(19) United States
(12) Patent Application Publication
(10) Pub. No.: US 2017/0314074 A1
(43) Pub. Date: Nov. 2, 2017

(54) LPA-ASSOCIATED PROTEIN AND RNA EXPRESSION

(71) Applicant: Intermune, Inc., Brisbane, CA (US)

(72) Inventors: Karl Kossen, Burlingame, CA (US); Sharlene R. Lim, San Mateo, CA (US); Scott D. Seiwert, Half Moon Bay, CA (US); Donald Ruhrmund, San Francisco, CA (US)

(21) Appl. No.: 15/351,719

(22) Filed: Nov. 15, 2016

Related U.S. Application Data
(63) Continuation of application No. PCT/US2015/031427, filed on May 18, 2015.
(60) Provisional application No. 61/994,768, filed on May 16, 2014.

(51) Int. Cl. C12Q 1/68

(52) U.S. Cl. CPC C12Q 1/6883; C12Q 2600/118; C12Q 2600/158

(57) ABSTRACT

Provided herein are, inter alia, methods and biomarkers to determine if a patient has or is at risk for developing an LPA-associated disease, to indicate the progressiveness of the disease, and/or to facilitate evaluation of responsiveness to therapy. Compositions and kits including the biomarker proteins and biomarker RNAs provided herein are further provided.

### CROSS-REFERENCES TO RELATED APPLICATIONS

[0001] This application is a continuation of International Application No. PCT/US2015/031427, filed May 18, 2015, which claims priority to U.S. Provisional Application No. 61/994,768, filed May 16, 2014, the disclosures of which are incorporated herein in their entireties and for all purposes.

### BACKGROUND OF THE INVENTION

[0002] Lysophospholipids (such as lysophosphatidic acid (LPA)) affect important cellular functions including cellular proliferation, differentiation, survival, migration, adhesion, invasion, and morphogenesis. These functions impact many biological processes including neurogenesis, angiogenesis, wound healing, immunity, and carcinogenesis. LPA acts through specific G protein-coupled receptors (GPCRs) in an autocrine and paracrine fashion. LPA binds to its cognate GPCRs (LPA₁, LPA₂, LPA₃, LPA₄, LPA₅, and LPA₆) and thereby activates intracellular signaling pathways to produce a variety of biological responses. LPA is an important biological effector molecule with a diverse range of physiological actions (e.g., effects on blood pressure, platelet activation, smooth muscle contraction, cell growth, cell rounding, neurite retraction, actin stress fiber formation, cell migration). LPA effects are predominantly receptor mediated and activation of the LPA receptors (LPA₁, LPA₂, LPA₃, LPA₄, LPA₅, and LPA₆) with LPA mediates a range of downstream signaling cascades. Nearly all mammalian cells, tissues, and organs co-express several LPA-receptor subtypes indicating that LPA receptor signaling occurs in a cooperative manner.

[0003] There is a need in the art for well-defined biomarkers to determine if a patient has or is at risk for developing an Lysophosphatidic Acid (LPA)-associated disease, to indicate the progressiveness of the disease, and/or to facilitate evaluation of responsiveness to therapy. The invention provided herein addresses these and other needs in the art by providing, inter alia, novel protein biomarkers of LPA-associated disease.

### BRIEF SUMMARY OF THE INVENTION

[0004] In one aspect, a method of determining an expression level of an LPA-associated disease marker protein set forth in Table 1 or Table 2 in a subject that has or is at risk for developing an LPA-associated disease is provided. The method includes obtaining a biological sample from the subject and determining an expression level of an LPA-associated disease marker protein set forth in Table 1 or Table 2 in the biological sample.

[0005] In another aspect, a method of determining an expression level of an LPA-associated disease marker RNA set forth in Table 3 or Table 4 in a subject that has or is at risk for developing an LPA-associated disease is provided. The method includes obtaining a biological sample from the subject and determining an expression level of an LPA-associated disease marker RNA set forth in Table 3 or Table 4 in the biological sample.

[0006] In another aspect, a method of determining whether a subject has or is at risk of developing an LPA-associated disease is provided. The method includes (i) detecting an expression level of one or more LPA-associated disease marker proteins set forth in Table 1 or Table 2 in a subject. (ii) It is determined whether the expression level is increased or decreased relative to a standard control, wherein an elevated expression level of an LPA-associated disease marker protein set forth in Table 1 or Table 2 or a decreased expression level of an LPA-associated disease marker protein set forth in Table 1 or Table 2 relative to the standard control indicates that the subject has or is at risk of developing an LPA-associated disease. Based at least in part on the expression level in step (ii), it is determined whether the subject has or is at risk for developing an LPA-associated disease.

[0007] In another aspect, a method of determining whether a subject has or is at risk of developing an LPA-associated disease is provided. The method includes (i) detecting an expression level of one or more LPA-associated disease marker RNAs set forth in Table 3 or Table 4 in a subject. (ii) It is determined whether the expression level is increased or decreased relative to a standard control, wherein an elevated expression level of an LPA-associated disease marker RNA set forth in Table 3 or Table 4 or a decreased expression level of an LPA-associated disease marker RNA set forth in Table 3 or Table 4 relative to the standard control indicates that the subject has or is at risk of developing an LPA-associated disease. Based at least in part on the expression level in step (ii), it is determined whether the subject has or is at risk for developing an LPA-associated disease.

[0008] In another aspect, a method of determining an LPA-associated disease activity in a patient is provided. The method includes (i) determining a first expression level of a protein set forth in Table 1 or Table 2 in the patient at a first time point. (ii) A second expression level of a protein set forth in Table 1 or Table 2 in the patient is determined at a second time point. (iii) The second expression level of a protein set forth in Table 1 or Table 2 is compared to the first expression level of a protein set forth in Table 1 or Table 2, thereby determining the LPA-associated disease activity in the patient.

[0009] In another aspect, a method of determining an LPA-associated disease activity in a patient is provided. The method includes (i) determining a first expression level of an RNA set forth in Table 3 or Table 4 in the patient at a first time point. (ii) A second expression level of an RNA set forth in Table 3 or Table 4 is determined in the patient at a second time point. (iii) The second expression level of an RNA set forth in Table 3 or Table 4 is compared to the first expression level of an RNA set forth in Table 3 or Table 4, thereby determining the LPA-associated disease activity in the patient.

[0010] In another aspect, a method of treating an LPA-associated disease in a subject in need thereof is provided. The method includes administering to the subject an effective amount of an modulator of an LPA-associated disease marker protein set forth in Table 1 or Table 2, thereby treating an LPA-associated disease in the subject.

[0011] In another aspect, a method of treating an LPA-associated disease in a subject in need thereof is provided. The method includes administering to the subject an effective amount of an modulator of an LPA-associated disease marker RNA set forth in Table 3 or Table 4, thereby treating an LPA-associated disease in the subject.

[0012] In another aspect, a method of treating an LPA-associated disease in a subject in need thereof is provided. The method includes (i) determining whether a subject expresses an elevated level or a decreased level of an LPA-associated disease marker protein set forth in Table 1 or Table 2 relative to a standard control. (ii) When an elevated expression level or a decreased expression level of the LPA-associated disease marker protein set forth in Table 1 or Table 2 is found relative to the standard control, an LPA-associated disease treatment, an antagonist or an agonist of an LPA-associated disease marker protein set forth in Table 1 or Table 2 is administered to the subject, thereby treating the subject.

[0013] In another aspect, a method of treating an LPA-associated disease in a subject in need thereof is provided. The method includes (i) determining whether a subject expresses an elevated level or a decreased level of an LPA-associated disease marker RNA set forth in Table 3 or Table 4 relative to a standard control. (ii) When an elevated expression level or a decreased expression level of the LPA-associated disease marker RNA set forth in Table 3 or Table 4 is found relative to the standard control, an LPA-associated disease treatment, an antagonist or an agonist of an LPA-associated disease marker RNA set forth in Table 3 or Table 4 is administered to the subject, thereby treating the subject.

[0014] In another aspect, a method of determining whether an LPA-associated disease patient is at risk for progression of the LPA-associated disease is provided. The method includes (i) detecting an expression level of one or more LPA-associated disease marker proteins set forth in Table 1 or Table 2 in an LPA-associated disease patient. (ii) It is determined whether the expression level is modulated relative to a standard control, wherein a modulated expression level of an LPA-associated disease marker protein set forth in Table 1 or Table 2 relative to the standard control indicates that the LPA-associated disease patient is at risk for progression of the LPA-associated disease. (iii) Based at least in part on the expression level in step (ii), it is determined whether the LPA-associated disease patient is at risk for progression of the LPA-associated disease.

[0015] In another aspect, a method of determining whether an LPA-associated disease patient is at risk for progression of the LPA-associated disease is provided. The method includes (i) detecting an expression level of one or more LPA-associated disease marker RNAs set forth in Table 3 or Table 4 in an LPA-associated disease patient. (ii) It is determined whether the expression level is modulated relative to a standard control, wherein a modulated expression level of an LPA-associated disease marker RNA set forth in Table 3 or Table 4 relative to the standard control indicates that the LPA-associated disease patient is at risk for progression of the LPA-associated disease. (iii) Based at least in part on the expression level in step (ii), it is determined whether the LPA-associated disease patient is at risk for progression of the LPA-associated disease.

[0016] In another aspect, a method of determining whether an LPA-associated disease patient is at risk for progression of the LPA-associated disease is provided. The method includes (i) determining a first expression level of a protein set forth in Table 1 or Table 2 in the patient at a first time point. (ii) A second expression level of a protein set forth in Table 1 or Table 2 in the patient is determined at a second time point. (iii) The second expression level of a protein set forth in Table 1 or Table 2 is compared to the first expression level of a protein set forth in Table 1 or Table 2, wherein when the second expression level of a protein set forth in Table 1 or Table 2 is different from the first level of a protein set forth in Table 1 or Table 2, the patient is at risk for progression of the LPA-associated disease.

[0017] In another aspect, a method of determining an expression level of an LPA-associated disease marker protein of SEQ ID NO:1-202 in a subject that has or is at risk for developing an LPA-associated disease is provided. The method includes (i) obtaining a biological sample from the subject; and (ii) determining an expression level of an LPA-associated disease marker protein of SEQ ID NO:1-202 in the biological sample.

[0018] In another aspect, a method of determining an expression level of an LPA-associated disease marker RNA of SEQ ID NO:203-499 in a subject that has or is at risk for developing an LPA-associated disease is provided. The method includes (i) obtaining a biological sample from the subject; and (ii) determining an expression level of an LPA-associated disease marker RNA of SEQ ID NO:203-499 in the biological sample.

[0019] In another aspect, a method of determining whether a subject has or is at risk of developing an LPA-associated disease is provided. The method includes (i) detecting an expression level of one or more LPA-associated disease marker proteins of SEQ ID NO:1-202 in a subject. (ii) It is determined whether the expression level is increased or decreased relative to a standard control, wherein an elevated expression level of an LPA-associated disease marker protein of SEQ ID NO:1-202 or a decreased expression level of an LPA-associated disease marker protein of SEQ ID NO:1-202 relative to the standard control indicates that the subject has or is at risk of developing an LPA-associated disease. And (iii) based at least in part on the expression level in step (ii), determining whether the subject has or is at risk for developing an LPA-associated disease.

[0020] In another aspect, a method of determining whether a subject has or is at risk of developing an LPA-associated disease is provided. The method includes (i) detecting an expression level of one or more LPA-associated disease marker RNAs of SEQ ID NO:203-499 in a subject. (ii) It is determined whether the expression level is increased or decreased relative to a standard control, wherein an elevated expression level of an LPA-associated disease marker RNA of SEQ ID NO:203-499 or a decreased expression level of an LPA-associated disease marker RNA of SEQ ID NO:203-499 relative to the standard control indicates that the subject has or is at risk of developing an LPA-associated disease. And (iii) based at least in part on the expression level in step (ii), determining whether the subject has or is at risk for developing an LPA-associated disease.

[0021] In another aspect, a method of determining an LPA-associated disease activity in a patient is provided. The method includes (i) determining a first expression level of a protein of SEQ ID NO:1-202 in the patient at a first time point. (ii) A second expression level of a protein of SEQ ID NO:1-202 in the patient is determined at a second time point. (iii) The second expression level of a protein of SEQ ID NO:1-202 is compared to the first expression level of a protein of SEQ ID NO:1-202, thereby determining the LPA-associated disease activity in the patient.

[0022] In another aspect, a method of determining an LPA-associated disease activity in a patient is provided. The method includes (i) determining a first expression level of an RNA of SEQ ID NO:203-499 in the patient at a first time point. (ii) A second expression level of an RNA of SEQ ID NO:203-499 is determined in the patient at a second time point. (iii) The second expression level of an RNA of SEQ ID NO:203-499 is compared to the first expression level of an RNA of SEQ ID NO:203-499, thereby determining the LPA-associated disease activity in the patient.

[0023] In another aspect, a method of treating an LPA-associated disease in a subject in need thereof is provided. The method includes administering to the subject an effective amount of an modulator of an LPA-associated disease marker protein of SEQ ID NO:1-202, thereby treating an LPA-associated disease in the subject.

[0024] In another aspect, a method of treating an LPA-associated disease in a subject in need thereof is provided. The method includes administering to the subject an effective amount of an modulator of an LPA-associated disease marker RNA of SEQ ID NO:203-499, thereby treating an LPA-associated disease in the subject.

[0025] In another aspect, a method of treating an LPA-associated disease in a subject in need thereof is provided. The method includes (i) determining whether a subject expresses an elevated level or a decreased level of an LPA-associated disease marker protein of SEQ ID NO:1-202 relative to a standard control. And (ii) when an elevated expression level or a decreased expression level of the LPA-associated disease marker protein of SEQ ID NO:1-202 is found relative to the standard control, administering to the subject an LPA-associated disease treatment, an antagonist or an agonist of an LPA-associated disease marker protein of SEQ ID NO:1-202, thereby treating the subject.

[0026] In another aspect, a method of treating an LPA-associated disease in a subject in need thereof is provided. The method includes (i) determining whether a subject expresses an elevated level or a decreased level of an LPA-associated disease marker RNA of SEQ ID NO:203-499 relative to a standard control. And (ii) when an elevated expression level or a decreased expression level of the LPA-associated disease marker RNA of SEQ ID NO:203-499 is found relative to the standard control, administering to the subject an LPA-associated disease treatment, an antagonist or an agonist of an LPA-associated disease marker RNA of SEQ ID NO:203-499, thereby treating the subject.

[0027] In another aspect, a method of determining whether an LPA-associated disease patient is at risk for progression of the LPA-associated disease is provided. The method includes (i) detecting an expression level of one or more LPA-associated disease marker proteins set forth of SEQ ID NO:1-202 in an LPA-associated disease patient. (ii) It is determined whether the expression level is modulated relative to a standard control, wherein a modulated expression level of an LPA-associated disease marker protein of SEQ ID NO:1-202 relative to the standard control indicates that the LPA-associated disease patient is at risk for progression of the LPA-associated disease; and (iii) based at least in part on the expression level in step (ii), determining whether the LPA-associated disease patient is at risk for progression of the LPA-associated disease.

[0028] In another aspect, a method of determining whether an LPA-associated disease patient is at risk for progression of the LPA-associated disease is provided. The method includes (i) detecting an expression level of one or more LPA-associated disease marker RNAs of SEQ ID NO:203-499 in an LPA-associated disease patient. (ii) It is determined whether said expression level is modulated relative to a standard control, wherein a modulated expression level of an LPA-associated disease marker RNA of SEQ ID NO:203-499 relative to the standard control indicates that the LPA-associated disease patient is at risk for progression of said LPA-associated disease; and (iii) based at least in part on the expression level in step (ii), determining whether the LPA-associated disease patient is at risk for progression of the LPA-associated disease.

[0029] In another aspect, a complex in vitro is provided. The complex includes a marker protein binding agent bound to a LPA-associated disease marker protein of SEQ ID NO:1-202 or fragment thereof, wherein the LPA-associated disease marker protein is extracted from a human subject having or at risk of developing an LPA-associated disease.

[0030] In another aspect, a complex in vitro is provided. The complex includes a marker RNA binding agent bound to a LPA-associated disease marker RNA of SEQ ID NO:203-499 or fragment thereof, wherein the LPA-associated disease marker RNA is extracted from a human subject having or at risk of developing an LPA-associated disease.

[0031] In another aspect, a kit is provided. The kit includes (a) a marker protein binding agent capable of binding to a substance within a biological sample from a human subject having or at risk of developing an LPA-associated disease; wherein the substance is an LPA-associated disease marker protein of SEQ ID NO:1-202 or fragment thereof. And (b) a detecting reagent or a detecting apparatus capable of indicating binding of the marker protein binding agent to the substance.

[0032] In another aspect, a kit is provided. The kit includes (a) a marker RNA binding agent capable of binding to a substance within a biological sample from a human subject having or at risk of developing an LPA-associated disease; wherein the substance is an LPA-associated disease marker RNA of SEQ ID NO:203-499 or fragment thereof. And (b) a detecting reagent or a detecting apparatus capable of indicating binding of the marker RNA binding agent to the substance.

### BRIEF DESCRIPTION OF THE DRAWINGS

[0033] FIG. 1: LPA receptor expression in cells. Expression of LPA receptors 1-6 was assayed by qRT-PCR in primary human fibroblasts, endothelial cells, epithelial cells, and pericytes.

[0034] FIG. 2: Experimental Design for Gene Expression and Secreted Protein Analysis.

[0035] FIG. 3: LPA-Induced mRNAs in Primary Pulmonary Fibroblasts.

[0036] FIG. 4: Comparison of 1 μM LPA induction in Fibroblasts and Epithelial Cells.

[0037] FIG. 5: Selected Differentially Secreted Proteins from Fibroblasts.

[0038] FIG. 6: LPA-Induced Proteins Independently Associated With IPF.

### DETAILED DESCRIPTION OF THE INVENTION

### I. Definitions

[0039] The term “disease” refers to any deviation from the normal health of a mammal and includes a state when disease symptoms are present, as well as conditions in which a deviation (e.g., infection, gene mutation, genetic defect, etc.) has occurred, but symptoms are not yet manifested. According to the present invention, the methods disclosed herein are suitable for use in a patient that is a member of the Vertebrate class, Mammalia, including, without limitation, primates, livestock and domestic pets (e.g., a companion animal). Typically, a patient will be a human patient.

[0040] The terms “pulmonary disease,” “pulmonary disorder,” “lung disease,” etc. are used interchangeably herein. The term is used to broadly refer to lung disorders characterized by difficulty breathing, coughing, airway discomfort and inflammation, increased mucus, and/or pulmonary fibrosis.

[0041] The term “LPA-associated disease” is used to broadly refer to disorders or symptoms of disease associated with LPA function. In embodiments, the disease is caused by, or a symptom of the disease is caused by aberrant LPA function. LPA function as described herein refers to any cellular function affected by LPA and includes without limitation cellular proliferation, differentiation, survival, migration, adhesion, invasion, morphogenesis, neurogenesis, angiogenesis, wound healing, immunity, and carcinogenesis.

[0042] The term “associated” or “associated with” in the context of a substance (e.g., LPA) or substance activity (e.g., LPA activity) or substance function (e.g., LPA function) associated with a disease means that the disease is caused by (in whole or in part), or a symptom of the disease is caused by (in whole or in part) the substance or substance activity or function (i.e., LPA, LPA activity, LPA function). For example, a disease associated with LPA or a symptom of an LPA-associated disease or condition associated with an increase or decrease in LPA activity may be a disease or symptom that results (entirely or partially) from an increase or decrease in LPA activity (e.g. increase or decrease in LPA activity or increase or decrease in activity of an LPA signal transduction or signaling pathway). The term “signaling pathway” as used herein refers to a series of interactions between cellular and optionally extra-cellular components (e.g. proteins, nucleic acids, small molecules, ions, lipids) that conveys a change in one component to one or more other components, which in turn may convey a change to additional components, which is optionally propagated to other signaling pathway components.

[0043] Non-limiting examples of LPA-associated diseases are idiopathic pulmonary fibrosis, pulmonary fibrosis, bronchiolitis obliterans, chronic lung transplant rejection, scleroderma, primary focal segmental glomerulosclerosis (FSGC) or membranoproliferative glomerulonephritis (MPGN), idiopathic interstitial pneumonia, interstitial lung disease in systemic sclerosis, a fibrosis condition of the lung, autoimmune lung diseases, benign prostate hypertrophy, coronary or myocardial infarction, atrial fibrillation, cerebral infarction, myocardial fibrosis, musculoskeletal fibrosis, post-surgical adhesions, liver cirrhosis, renal fibrotic disease, fibrotic vascular disease, scleroderma, Hermansky-Pudlak syndrome, neurofibromatosis, Alzheimer's disease, diabetic retinopathy, or skin lesions, lymph node fibrosis associated with HIV, chronic obstructive pulmonary disease (COPD), inflammatory pulmonary fibrosis, rheumatoid arthritis; rheumatoid spondylitis; osteoarthritis; gout, other arthritic conditions; sepsis; septic shock; endotoxic shock; gram-negative sepsis; toxic shock syndrome; myofacial pain syndrome (MPS); Shigellosis; asthma; adult respiratory distress syndrome; inflammatory bowel disease; Crohn's disease; psoriasis; eczema; ulcerative colitis; glomerular nephritis; scleroderma; chronic thyroiditis; Grave's disease; Ormond's disease; autoimmune gastritis; myasthenia gravis; autoimmune hemolytic anemia; autoimmune neutropenia; thrombocytopenia; pancreatic fibrosis; chronic active hepatitis including hepatic fibrosis; acute or chronic renal disease; renal fibrosis; diabetic nephropathy; irritable bowel syndrome; pyresis; restenosis; cerebral malaria; stroke or ischemic injury; neural trauma; Alzheimer's disease; Huntington's disease; Parkinson's disease; acute or chronic pain; allergies, including allergic rhinitis or allergic conjunctivitis; cardiac hypertrophy, chronic heart failure; acute coronary syndrome; cachexia; malaria; leprosy; leishmaniasis; Lyme disease; Reiter's syndrome; acute synoviitis; muscle degeneration, bursitis; tendonitis; tenosynoviitis; herniated, ruptured, or prolapsed intervertebral disk syndrome; osteopetrosis; thrombosis; silicosis; pulmonary sarcosis; bone resorption diseases, such as osteoporosis or multiple myeloma-related bone disorders; cancer, including but not limited to metastatic breast carcinoma, colorectal carcinoma, malignant melanoma, gastric cancer, or non-small cell lung cancer; graft-versus-host reaction; or auto-immune diseases, such as multiple sclerosis, lupus or fibromyalgia; AIDS or other viral diseases such as Herpes Zoster, Herpes Simplex I or II, influenza virus, Severe Acute Respiratory Syndrome (SARS) or cytomegalovirus; or diabetes mellitus, proliferative disorders (including both benign or malignant hyperplasia), acute myelogenous leukemia, chronic myelogenous leukemia, Kaposi's sarcoma, metastatic melanoma, multiple myeloma, breast cancer, including metastatic breast carcinoma; colorectal. carcinoma; malignant melanoma; gastric cancer; non-small cell lung cancer (NSCLC); bone metastases; pain disorders including neuromuscular pain, headache, cancer pain, dental pain, or arthritis pain; angiogenic disorders including solid tumor angiogenesis, ocular neovascularization, or infantile hemangioma; conditions associated with the cyclooxygenase or lipoxygenase signaling pathways, including conditions associated with prostaglandin endoperoxide synthase-2 (including edema, fever, analgesia, or pain); organ hypoxia; thrombin-induced platelet aggregation; or protozoal diseases. For example, IPF and scleroderma (or systemic sclerosis) associated interstitial lung disease (SSc-ILD) share overlapping pathologic pathways, most notably the activation and proliferation of fibroblasts, expression of fibrogenic cytokines and growth factors, and progressive interstitial fibrosis.

[0044] The terms “subject,” “patient,” “individual,” and the like as used herein are not intended to be limiting and can be generally interchanged. That is, an individual described as a “patient” does not necessarily have a given disease, but may be merely seeking medical advice.

[0045] The term “subject” as used herein includes all members of the animal kingdom prone to suffering from the indicated disorder. In some aspects, the subject is a mammal, and in some aspects, the subject is a human.

[0046] A “control” sample or value refers to a sample that serves as a reference, usually a known reference, for comparison to a test sample. For example, a test sample can be taken from a patient suspected of having an LPA-associated disease and compared to samples from a known LPA-associated disease patient, or a known normal (non-disease) individual. A control can also represent an average value gathered from a population of similar individuals, e.g., LPA-associated disease patients or healthy individuals with a similar medical background, same age, weight, etc. A control value can also be obtained from the same individual, e.g., from an earlier-obtained sample, prior to disease, or prior to treatment. One of skill will recognize that controls can be designed for assessment of any number of parameters.

[0047] One of skill in the art will understand which controls are valuable in a given situation and be able to analyze data based on comparisons to control values. Controls are also valuable for determining the significance of data. For example, if values for a given parameter are widely variant in controls, variation in test samples will not be considered as significant.

[0048] As used herein, the terms “pharmaceutically” acceptable is used synonymously with physiologically acceptable and pharmacologically acceptable. A pharmaceutical composition will generally comprise agents for buffering and preservation in storage, and can include buffers and carriers for appropriate delivery, depending on the route of administration.

[0049] The terms “dose” and “dosage” are used interchangeably herein. A dose refers to the amount of active ingredient given to an individual at each administration. For the present invention, the dose will generally refer to the amount of LPA-associated disease treatment, agonist or antagonist. The dose will vary depending on a number of factors, including the range of normal doses for a given therapy, frequency of administration; size and tolerance of the individual; severity of the condition; risk of side effects; and the route of administration. One of skill will recognize that the dose can be modified depending on the above factors or based on therapeutic progress. The term “dosage form” refers to the particular format of the pharmaceutical, and depends on the route of administration. For example, a dosage form can be in a liquid form for nebulization, e.g., for inhalants, in a tablet or liquid, e.g., for oral delivery, or a saline solution, e.g., for injection.

[0050] As used herein, the terms “treat” and “prevent” are not intended to be absolute terms. Treatment can refer to any delay in onset, reduction in the frequency or severity of symptoms, amelioration of symptoms, improvement in patient comfort and/or respiratory function, etc. The effect of treatment can be compared to an individual or pool of individuals not receiving a given treatment, or to the same patient prior to, or after cessation of, treatment.

[0051] “Treating” or “treatment” as used herein (and as well-understood in the art) also broadly includes any approach for obtaining beneficial or desired results in a subject's condition, including clinical results. Beneficial or desired clinical results can include, but are not limited to, alleviation or amelioration of one or more symptoms or conditions, diminishment of the extent of a disease, stabilizing (i.e., not worsening) the state of disease, prevention of a disease's transmission or spread, delay or slowing of disease progression, amelioration or palliation of the disease state, diminishment of the reoccurrence of disease, and remission, whether partial or total and whether detectable or undetectable. In other words, “treatment” as used herein includes any cure, amelioration, or prevention of a disease. Treatment may prevent the disease from occurring; inhibit the disease's spread; relieve the disease's symptoms, fully or partially remove the disease's underlying cause, shorten a disease's duration, or do a combination of these things.

[0052] “Treating” and “treatment” as used herein include prophylactic treatment. Treatment methods include administering to a subject a therapeutically effective amount of an active agent. The administering step may consist of a single administration or may include a series of administrations. The length of the treatment period depends on a variety of factors, such as the severity of the condition, the age of the patient, the concentration of active agent, the activity of the compositions used in the treatment, or a combination thereof. It will also be appreciated that the effective dosage of an agent used for the treatment or prophylaxis may increase or decrease over the course of a particular treatment or prophylaxis regime. Changes in dosage may result and become apparent by standard diagnostic assays known in the art. In some instances, chronic administration may be required. For example, the compositions are administered to the subject in an amount and for a duration sufficient to treat the patient.

[0053] The term “prevent” refers to a decrease in the occurrence of LPA-associated disease symptoms in a patient. As indicated above, the prevention may be complete (no detectable symptoms) or partial, such that fewer symptoms are observed than would likely occur absent treatment.

[0054] The term “therapeutically effective amount,” as used herein, refers to that amount of the therapeutic agent sufficient to ameliorate the disorder, as described above. For example, for the given parameter, a therapeutically effective amount will show an increase or decrease of at least 5%, 10%, 15%, 20%, 25%, 40%, 50%, 60%, 75%, 80%, 90%, or at least 100%. Therapeutic efficacy can also be expressed as “-fold” increase or decrease. For example, a therapeutically effective amount can have at least a 1.2-fold, 1.5-fold, 2-fold, 5-fold, or more effect over a control.

[0055] The term “diagnosis” refers to a relative probability that an LPA-associated disease is present in the subject. Similarly, the term “prognosis” refers to a relative probability that a certain future outcome may occur in the subject. For example, in the context of the present invention, prognosis can refer to the likelihood that an individual will develop an LPA-associated disease, or the likely severity of the disease (e.g., severity of symptoms, rate of functional decline, survival, etc.). The terms are not intended to be absolute, as will be appreciated by any one of skill in the field of medical diagnostics.

[0056] The terms “correlating” and “associated,” in reference to determination of a LPA-associated disease risk factor, refers to comparing the presence or amount of the risk factor (e.g., decreased or increased expression of an LPA-associated biomarker protein) in an individual to its presence or amount in persons known to suffer from, or known to be at risk of, the LPA-associated disease, or in persons known to be free of LPA-associated disease, and assigning an increased or decreased probability of having/developing the LPA-associated disease to an individual based on the assay result(s).

[0057] “Nucleic acid” or “oligonucleotide” or “polynucleotide” or grammatical equivalents used herein means at least two nucleotides covalently linked together. Oligonucleotides are typically from about 5, 6, 7, 8, 9, 10, 12, 15, 25, 30, 40, 50 or more nucleotides in length, up to about 100 nucleotides in length. Nucleic acids, including ribonucleic acids (RNA) and deoxyribonucleic acids (DNA), and polynucleotides are a polymers of any length, including longer lengths, e.g., 200, 300, 500, 1000, 2000, 3000, 5000, 7000, 10,000, etc. A nucleic acid of the present invention will generally contain phosphodiester bonds, although in some cases, nucleic acid analogs are included that may have alternate backbones, comprising, e.g., phosphoramidate, phosphorothioate, phosphorodithioate, or O-methylphophoroamidite linkages (see Eckstein, Oligonucleotides and Analogues: A Practical Approach, Oxford University Press); and peptide nucleic acid backbones and linkages. Other analog nucleic acids include those with positive backbones; non-ionic backbones, and non-ribose backbones, including those described in U.S. Pat. Nos. 5,235,033 and 5,034,506, and Chapters 6 and 7, ASC Symposium Series 580, Carbohydrate Modifications in Antisense Research, Sanghui & Cook, eds. Nucleic acids containing one or more carbocyclic sugars are also included within one definition of nucleic acids. Modifications of the ribose-phosphate backbone may be done for a variety of reasons, e.g., to increase the stability and half-life of such molecules in physiological environments or as probes on a biochip. Mixtures of naturally occurring nucleic acids and analogs can be made; alternatively, mixtures of different nucleic acid analogs, and mixtures of naturally occurring nucleic acids and analogs may be made.

[0058] The terms “identical” or percent “identity,” in the context of two or more nucleic acids (e.g., genomic sequences or subsequences or coding sequences) or polypeptide sequences, refer to two or more sequences or subsequences that are the same or have a specified percentage of amino acid residues or nucleotides that are the same (i.e., 50%, 55%, 60%, 65%, 70%, 75%, 80%, 85%, 90%, 91%, 92%, 93%, 94%, 95%, 96%, 97%, 98%, 99%, or more identity over a specified region), when compared and aligned for maximum correspondence over a comparison window, or designated region as measured using one of the following sequence comparison algorithms or by manual alignment and visual inspection. Such sequences are then said to be “substantially identical.” This definition also refers to the compliment of a test sequence. Optionally, the identity exists over a region that is at least about 10 to about 100, about 20 to about 75, about 30 to about 50 amino acids or nucleotides in length.

[0059] An example of algorithms suitable for determining percent sequence identity and sequence similarity are the BLAST and BLAST 2.0 algorithms, which are described in Altschul et al., Nuc. Acids Res. 25:3389-3402 (1977) and Altschul et al., J. Mol. Biol. 215:403-410 (1990), respectively. As will be appreciated by one of skill in the art, the software for performing BLAST analyses is publicly available through the website of the National Center for Biotechnology Information (ncbi.nlm.nih.gov).

[0060] The terms “polypeptide,” “peptide” and “protein” are used interchangeably herein to refer to a polymer of amino acid residues. The terms apply to amino acid polymers in which one or more amino acid residue is an artificial chemical mimetic of a corresponding naturally occurring amino acid, as well as to naturally occurring amino acid polymers, those containing modified residues, and non-naturally occurring amino acid polymer.

[0061] The term “amino acid” refers to naturally occurring and synthetic amino acids, as well as amino acid analogs and amino acid mimetics that function similarly to the naturally occurring amino acids. Naturally occurring amino acids are those encoded by the genetic code, as well as those amino acids that are later modified, e.g., hydroxyproline, γ-carboxyglutamate, and 0-phosphoserine. Amino acid analogs refers to compounds that have the same basic chemical structure as a naturally occurring amino acid, e.g., an a carbon that is bound to a hydrogen, a carboxyl group, an amino group, and an R group, e.g., homoserine, norleucine, methionine sulfoxide, methionine methyl sulfonium. Such analogs may have modified R groups (e.g., norleucine) or modified peptide backbones, but retain the same basic chemical structure as a naturally occurring amino acid. Amino acid mimetics refers to chemical compounds that have a structure that is different from the general chemical structure of an amino acid, but that functions similarly to a naturally occurring amino acid.

[0062] Amino acids may be referred to herein by either their commonly known three letter symbols or by the one-letter symbols recommended by the IUPAC-IUB Biochemical Nomenclature Commission. Nucleotides, likewise, may be referred to by their commonly accepted single-letter codes.

[0063] “Conservatively modified variants” applies to both amino acid and nucleic acid sequences. With respect to particular nucleic acid sequences, conservatively modified variants refers to those nucleic acids which encode identical or essentially identical amino acid sequences, or where the nucleic acid does not encode an amino acid sequence, to essentially identical or associated, e.g., naturally contiguous, sequences. Because of the degeneracy of the genetic code, a large number of functionally identical nucleic acids encode most proteins. For instance, the codons GCA, GCC, GCG and GCU all encode the amino acid alanine. Thus, at every position where an alanine is specified by a codon, the codon can be altered to another of the corresponding codons described without altering the encoded polypeptide. Such nucleic acid variations are “silent variations,” which are one species of conservatively modified variations. Every nucleic acid sequence herein which encodes a polypeptide also describes silent variations of the nucleic acid. One of skill will recognize that in certain contexts each codon in a nucleic acid (except AUG, which is ordinarily the only codon for methionine, and TGG, which is ordinarily the only codon for tryptophan) can be modified to yield a functionally identical molecule. Accordingly, often silent variations of a nucleic acid which encodes a polypeptide is implicit in a described sequence with respect to the expression product, but not with respect to actual probe sequences.

[0064] As to amino acid sequences, one of skill will recognize that individual substitutions, deletions or additions to a nucleic acid, peptide, polypeptide, or protein sequence which alters, adds or deletes a single amino acid or a small percentage of amino acids in the encoded sequence is a “conservatively modified variant” where the alteration results in the substitution of an amino acid with a chemically similar amino acid. Conservative substitution tables providing functionally similar amino acids are well known in the art. Such conservatively modified variants are in addition to and do not exclude polymorphic variants, interspecies homologs, and alleles of the invention. Typically conservative substitutions for one another: 1) Alanine (A), Glycine (G); 2) Aspartic acid (D), Glutamic acid (E); 3) Asparagine (N), Glutamine (Q); 4) Arginine (R), Lysine (K); 5) Isoleucine (I), Leucine (L), Methionine (M), Valine (V); 6) Phenylalanine (F), Tyrosine (Y), Tryptophan (W); 7) Serine (S), Threonine (T); and 8) Cysteine (C), Methionine (M) (see, e.g., Creighton, Proteins (1984)).

[0065] A “label” or a “detectable moiety” is a composition detectable by spectroscopic, photochemical, biochemical, immunochemical, chemical, or other physical means. For example, useful labels include ³²P, fluorescent dyes, electron-dense reagents, enzymes (e.g., as commonly used in an ELISA), biotin, digoxigenin, or haptens and proteins or other entities which can be made detectable, e.g., by incorporating a radiolabel into a peptide or antibody specifically reactive with a target peptide. Any method known in the art for conjugating an antibody to the label may be employed, e.g., using methods described in Hermanson, Bioconjugate Techniques 1996, Academic Press, Inc., San Diego.

[0066] A “labeled protein or polypeptide” is one that is bound, either covalently, through a linker or a chemical bond, or noncovalently, through ionic, van der Waals, electrostatic, or hydrogen bonds to a label such that the presence of the labeled protein or polypeptide may be detected by detecting the presence of the label bound to the labeled protein or polypeptide. Alternatively, methods using high affinity interactions may achieve the same results where one of a pair of binding partners binds to the other, e.g., biotin, streptavidin.

[0067] “Antibody” refers to a polypeptide comprising a framework region from an immunoglobulin gene or fragments thereof that specifically binds and recognizes an antigen, e.g., a specific bacterial antigen. Typically, the “variable region” contains the antigen-binding region of the antibody (or its functional equivalent) and is most critical in specificity and affinity of binding. See Paul, Fundamental Immunology (2003).

[0068] An exemplary immunoglobulin (antibody) structural unit comprises a tetramer. Each tetramer is composed of two identical pairs of polypeptide chains, each pair having one “light” (about 25 kD) and one “heavy” chain (about 50-70 kD). The N-terminus of each chain defines a variable region of about 100 to 110 or more amino acids primarily responsible for antigen recognition. The terms variable light chain (V_{L}) and variable heavy chain (V_{H}) refer to these light and heavy chains respectively.

[0069] Antibodies can exist as intact immunoglobulins or as any of a number of well-characterized fragments that include specific antigen-binding activity. Such fragments can be produced by digestion with various peptidases. Pepsin digests an antibody below the disulfide linkages in the hinge region to produce F(ab)′₂, a dimer of Fab which itself is a light chain joined to V_{H}-C_{H}1 by a disulfide bond. The F(ab)′₂ may be reduced under mild conditions to break the disulfide linkage in the hinge region, thereby converting the F(ab)′₂ dimer into an Fab′ monomer. The Fab′ monomer is essentially Fab with part of the hinge region (see Fundamental Immunology (Paul ed., 3d ed. 1993). While various antibody fragments are defined in terms of the digestion of an intact antibody, one of skill will appreciate that such fragments may be synthesized de novo either chemically or by using recombinant DNA methodology. Thus, the term antibody, as used herein, also includes antibody fragments either produced by the modification of whole antibodies, or those synthesized de novo using recombinant DNA methodologies (e.g., single chain Fv) or those identified using phage display libraries (see, e.g., McCafferty et al., Nature 348:552-554 (1990)).

[0070] The term “aptamer” as provided herein refers to short oligonucleotides (e.g. deoxyribonucleotides), which fold into diverse and intricate molecular structures that bind with high affinity and specificity to proteins, peptides, and small molecules in a non-Watson Crick manner. An aptamer can thus be used to detect or otherwise target nearly any molecule of interest, including an LPA-associated disease marker protein. Methods of constructing and determining the binding characteristics of aptamers are well known in the art. For example, such techniques are described in U.S. Pat. Nos. 5,582,981, 5,595,877 and 5,637,459. Aptamers are typically at least 5 nucleotides, 10, 20, 30 or 40 nucleotides in length, and can be composed of modified nucleic acids to improve stability. Flanking sequences can be added for structural stability, e.g., to form 3-dimensional structures in the aptamer. Aptamers can be selected in vitro from very large libraries of randomized sequences by the process of systemic evolution of ligands by exponential enrichment (SELEX as described in Ellington A D, Szostak J W (1990) In vitro selection of RNA molecules that bind specific ligands. Nature 346:818-822; Tuerk C, Gold L (1990) Systematic evolution of ligands by exponential enrichment: RNA ligands to bacteriophage T4 DNA polymerase. Science 249:505-510) or by developing SOMAmers (slow off-rate modified aptamers) (Gold L et al. (2010) Aptamer-based multiplexed proteomic technology for biomarker discovery. PLoS ONE 5(12):e15004). Applying the SELEX and the SOMAmer technology includes for instance adding functional groups that mimic amino acid side chains to expand the aptamers' chemical diversity. As a result high affinity aptamers for almost any protein target are enriched and identified.

[0071] A “biomarker,” “marker protein, “biomarker protein,” “marker RNA, or “biomarker RNA” as provided herein refers to any assayable characteristics or compositions that are used to identify, predict, or monitor a condition (e.g., an LPA-associated disease or lack thereof) or a therapy for said condition in a subject or sample. A biomarker is, for example, a protein or combination of proteins, an RNA or a combination of RNAs whose presence, absence, or relative amount is used to identify a condition (e.g. an LPA-associated disease) or status of a condition (e.g. an LPA-associated disease) in a subject or sample. Biomarkers identified herein are measured to determine levels, expression, activity, or to detect fragments, variants or homologs of said biomarkers. Variants include amino acid or nucleic acid variants or post translationally modified variants. In embodiments, the marker protein is a protein or fragment thereof as set forth in Table 1, Table 2 or Table 5. In embodiments, the marker protein is a homolog of the protein listed in Table 1, Table 2 or Table 5. In embodiments, the marker protein is a protein of SEQ ID NO:1-202 or fragment thereof. In embodiments, the marker protein is a homolog of the protein of SEQ ID NO:1-202. The marker proteins provided herein are identified by accession numbers referring to the corresponding amino acid and/or nucleic acid sequence of the individual marker proteins. Therefore, a person of ordinary skill in the art will immediately recognize the sequences of the marker proteins provided herein.

[0072] In embodiments, the marker RNA is an RNA of SEQ ID NO:203-499 or fragment thereof. In embodiments, the marker RNA is a homolog of the RNA of SEQ ID NO:203-499. In embodiments, the marker RNA complementary to SEQ ID NO:203-499 or fragments thereof. In embodiments, the marker RNA includes a sequence of at least 20 nucleotides complementary to SEQ ID NO:203-499 or fragments thereof. In embodiments, the marker RNA includes a sequence of at least 30 nucleotides complementary to SEQ ID NO:203-499 or fragments thereof. In embodiments, the marker RNA includes a sequence of at least 40 nucleotides complementary to SEQ ID NO:203-499 or fragments thereof. In embodiments, the marker RNA includes a sequence of at least 50 nucleotides complementary to SEQ ID NO:203-499 or fragments thereof In embodiments, the marker RNA includes a sequence of at least 60 nucleotides complementary to SEQ ID NO:203-499 or fragments thereof. In embodiments, the marker RNA includes a sequence of at least 70 nucleotides complementary to SEQ ID NO:203-499 or fragments thereof. In embodiments, the marker RNA includes a sequence of at least 80 nucleotides complementary to SEQ ID NO:203-499 or fragments thereof. In embodiments, the marker RNA includes a sequence of at least 90 nucleotides complementary to SEQ ID NO:203-499 or fragments thereof. In embodiments, the marker RNA includes a sequence of at least 100 nucleotides complementary to SEQ ID NO:203-499 or fragments thereof. In embodiments, the marker RNA includes about 50 nucleotides complementary to SEQ ID NO:203-499 or fragments thereof. In embodiments, the marker RNA is sequence at least 50%, 55%, 60%, 65,%, 70%, 75%, 80%, 85%, 90%, 95%, 96%, 97%, 98%, 99% or 100% identical to SEQ ID NO:203-499. In embodiments, the marker RNA has a sequence at least 50%, 55%, 60%, 65,%, 70%, 75%, 80%, 85%, 90%, 95%, 96%, 97%, 98%, 99% or 100% identical to the complement of SEQ ID NO:203-499.

[0073] In embodiments, the marker RNA is an RNA or fragment thereof as set forth in Table 3 or Table 4. In embodiments, the marker RNA is a homolog of the RNA listed in Table 3 or Table 4. The marker RNAs provided herein are identified by accession numbers referring to the corresponding nucleic acid sequence of the individual marker RNAs. Therefore, a person of ordinary skill in the art will immediately recognize the sequences of the marker RNAs provided herein.

[0074] In some examples of the disclosed methods, when the expression level of a biomarker(s) is assessed, the level is compared with control expression level of the biomarker(s). By control level is meant the expression level of a particular biomarker(s) from a sample or subject lacking a disease (e.g. an LPA-associated disease), at a selected stage of a disease or disease state, or in the absence of a particular variable such as a therapeutic agent. Alternatively, the control level comprises a known amount of biomarker. Such a known amount correlates with an average level of subjects lacking a disease, at a selected stage of a disease or disease state, or in the absence of a particular variable such as a therapeutic agent. A control level also includes the expression level of one or more biomarkers from one or more selected samples or subjects as described herein. For example, a control level includes an assessment of the expression level of one or more biomarkers in a sample from a subject that does not have a disease (e.g. an LPA-associated disease), is at a selected stage of progression of a disease (e.g. an LPA-associated disease), or has not received treatment for a disease. Another exemplary control level includes an assessment of the expression level of one or more biomarkers in samples taken from multiple subjects that do not have a disease, are at a selected stage of progression of a disease, or have not received treatment for a disease.

[0075] When the control level includes the expression level of one or more biomarkers in a sample or subject in the absence of a therapeutic agent, the control sample or subject is optionally the same sample or subject to be tested before or after treatment with a therapeutic agent or is a selected sample or subject in the absence of the therapeutic agent. Alternatively, a control level is an average expression level calculated from a number of subjects without a particular disease. A control level also includes a known control level or value known in the art.

[0076] In one particular example, a biomarker is a protein or combination of proteins whose expression level in a subject or sample is indicative of an LPA-associated disease or an LPA-associated disease activity. The expression level of a biomarker or a combination of a plurality of biomarkers may be increased or decreased compared to a control level. For example, the expression level of a biomarker or a combination of a plurality of biomarkers as provided herein may be increased or decreased in a subject compared to the expression level of the same subject at an earlier time point. Therefore, the expression level of a biomarker as provided herein may be indicative of a specific disease stage. Alternatively, the biomarker may be indicative of the efficacy of treatment. In other words, the expression level of a biomarker may be indicative of whether a patient is responsive to a treatment. The biomarker may further be indicative of the activity of a disease, wherein the activity of a disease refers to the change of one or more biomarker expression levels over the course of the disease.

[0077] The terms “agonist,” “activator,” “upregulator,” etc. refer to a substance capable of detectably increasing the expression or activity of a given gene or protein. The agonist can increase expression or activity 10%, 20%, 30%, 40%, 50%, 60%, 70%, 80%, 90% or more in comparison to a control in the absence of the agonist. In certain instances, expression or activity is 1.5-fold, 2-fold, 3-fold, 4-fold, 5-fold, 10-fold or higher than the expression or activity in the absence of the agonist.

[0078] The terms “inhibitor,” “repressor” or “antagonist” or “downregulator” interchangeably refer to a substance capable of detectably decreasing the expression or activity of a given gene or protein. The antagonist can decrease expression or activity 10%, 20%, 30%, 40%, 50%, 60%, 70%, 80%, 90% or more in comparison to a control in the absence of the antagonist. In certain instances, expression or activity is 1.5-fold, 2-fold, 3-fold, 4-fold, 5-fold, 10-fold or lower than the expression or activity in the absence of the antagonist.

### II. Methods

[0079] Provided herein, inter alia, are biomarkers (e.g. protein biomarkers, RNA biomarkers) for diagnosing LPA-associated diseases as well as evaluation of progression, activity and treatment of LPA-associated diseases. Further provided herein are therapeutic targets for ameliorating LPA-associated diseases and compositions including an LPA-associated biomarker bound to a marker protein binding agent (e.g., an antibody).

[0080] In one aspect, a method of determining an expression level of an LPA-associated disease marker protein set forth in Table 1 or Table 2 in a subject that has or is at risk for developing an LPA-associated disease is provided. The method includes obtaining a biological sample from the subject and determining an expression level of an LPA-associated disease marker protein set forth in Table 1 or Table 2 in the biological sample.

[0081] In another aspect, a method of determining an expression level of an LPA-associated disease marker protein of SEQ ID NO:1-202 in a subject that has or is at risk for developing an LPA-associated disease is provided. The method includes (i) obtaining a biological sample from the subject; and (ii) determining an expression level of an LPA-associated disease marker protein of SEQ ID NO:1-202 in the biological sample.

[0082] In embodiments, the determining includes (a) contacting the LPA-associated disease marker protein with a marker protein binding agent in the biological sample, thereby forming a disease marker protein-binding agent complex; and (b) detecting the disease marker protein-binding agent complex. In embodiments, the marker protein binding agent includes a detectable moiety. In embodiments, the marker protein binding agent includes a capturing moiety. In embodiments, the capturing moiety is a cleavable capturing moiety. In embodiments, the detecting includes contacting the disease marker protein-binding agent complex with a capturing agent, thereby forming a captured disease marker protein-binding agent complex. In embodiments, the detecting further includes (1) contacting the captured disease marker protein-binding agent complex with a tagging moiety; thereby forming a tagged disease marker protein-binding agent complex; and (2) separating the tagged disease marker protein-binding agent complex from the biological sample. In embodiments, the detecting further includes after the separating of step (2) separating the capturing binding agent from the tagged disease marker protein-binding agent complex, thereby forming a cleaved disease marker protein-binding agent complex. In embodiments, the detecting further includes (3) separating the marker protein binding agent from the cleaved disease marker protein-binding agent complex; thereby forming a released marker protein binding agent; and (4) determining an amount of the released marker protein binding agent.

[0083] In embodiments, the method includes selecting a subject that has or is at risk for developing an LPA-associated disease. The selected subject may be treated for an LPA-associated disease. In some embodiments, the subject is not treated for an LPA-associated disease. The subject may be part of a plurality of subjects participating in a clinical trial. Wherein the subject is part of a clinical trial, the selecting is at least part based on the determining of an expression level as provided herein.

[0084] An LPA-associated disease marker protein is a biomarker protein useful to identify, predict, or monitor an LPA-associated disease or lack thereof or a therapy for an LPA-associated disease in a subject or sample. A person of ordinary skill in the art will immediately recognize that determining an expression level of an LPA-associated disease marker protein or an LPA-associated marker RNA described herein includes determining the level of one or more LPA-associated disease marker proteins or LPA-associated disease marker RNAs in a sample (e.g. patient biological sample such as a blood-derived biological sample). Thus is some embodiments, the expression level of a plurality of LPA-associated disease marker proteins or LPA-associated disease marker RNAs is determined. Wherein the expression level of a plurality of LPA-associated disease marker proteins or LPA-associated disease marker RNAs is determined, the level of at least two (e.g. 3, 4, 5, 6, 7, 8, 9, 10 etc.) LPA-associated disease marker proteins or LPA-associated disease marker RNAs is determined and the at least two LPA-associated disease marker proteins or LPA-associated disease marker RNAs are independently different.

[0085] In some embodiments, the LPA-associated disease is a fibrotic pulmonary disease. In embodiments, the fibrotic pulmonary disease is idiopathic pulmonary fibrosis or familial interstitial pneumonia. In embodiments, the fibrotic pulmonary disease is a progressive form of idiopathic pulmonary fibrosis. In other embodiments, the LPA-associated disease marker protein is a progressive fibrotic pulmonary disease marker protein or a progressive fibrotic pulmonary disease marker RNA. A progressive fibrotic pulmonary disease maker protein or RNA is a biomarker protein or RNA indicative of a fibrotic pulmonary disease patient having or being at risk of developing progressive fibrotic pulmonary disease (e.g., a progressive form of a fibrotic pulmonary disease). Thus, in some embodiments, the subject has or is at risk for developing a progressive fibrotic pulmonary disease. In other embodiments, the progressive fibrotic pulmonary disease is idiopathic pulmonary fibrosis. A progressive fibrotic pulmonary disease is a disease wherein certain clinical or physiological parameters decline over the course of the disease. Commonly used parameters to determine fibrotic pulmonary disease progression include for example, breathing metrics, such as forced expiratory volume (FEV1), vital capacity (VC), forced vital capacity (FVC), FEV1/FVC and diffusing capacity of carbon monoxide (DL_{CO}). For example, a fibrotic pulmonary disease patient showing a 5% decline in FVC as compared to a control level may be considered a progressive fibrotic pulmonary disease patient. A control level may be the FVC of the same patient measured at an earlier stage of the fibrotic pulmonary disease or the FVC calculated from a number of subjects lacking the fibrotic pulmonary disease. Thus, in some embodiments, the FVC of a progressive fibrotic pulmonary disease patient is at least 5% less than a control level.

[0086] In embodiments, the biological sample is a blood-derived biological sample, a urine-derived biological sample or a saliva-derived biological sample of the subject. In embodiments, the blood-derived biological sample is whole blood, serum or plasma.

[0087] The methods provided herein including embodiments thereof further include treating a subject for LPA-associated diseases. As described above the expression level of one or more LPA-associated disease marker proteins or LPA-associated disease marker RNAs is determined. In embodiments, the expression level of one or more LPA-associated disease marker RNAs is determined. In embodiments, an expression level of an LPA-associated disease marker protein of SEQ ID NO:1-202 is determined. In embodiments, an expression level of an LPA-associated disease marker RNA of SEQ ID NO:203-499 is determined.

[0088] The expression levels of the one or more LPA-associated disease marker proteins of SEQ ID NO:1-202 may be increased or decreased in an LPA-associated disease patient. The expression levels of the one or more LPA-associated disease marker RNAs of SEQ ID NO:203-499 may be increased or decreased in an LPA-associated disease patient. In some embodiments, the one or more LPA-associated disease marker proteins of SEQ ID NO:1-202 is increased. In some embodiments, the one or more LPA-associated disease marker proteins of SEQ ID NO:1-202 is decreased. In some embodiments, the one or more LPA-associated disease marker RNAs of SEQ ID NO:203-499 is increased. In some embodiments, the one or more LPA-associated disease marker RNAs of SEQ ID NO:203-499 is decreased. In embodiments, the expression level of the LPA-associated disease marker protein of SEQ ID NO:1-202 is elevated relative to a standard control. In embodiments, the expression level of the LPA-associated disease marker protein of SEQ ID NO:1-202 is deceased relative to a standard control. In embodiments, the expression level of the LPA-associated disease marker RNA of SEQ ID NO:203-499 is elevated relative to a standard control. In embodiments, the expression level of the LPA-associated disease marker RNA of SEQ ID NO:203-499 is deceased relative to a standard control.

[0089] A treatment regimen for an LPA-associated disease patient with modulated expression levels of one or more LPA-associated disease marker proteins or LPA-associated disease marker RNAs as disclosed herein (e.g. in Table 1, 2, 3, 4 or 5) may be administering to the patient an effective amount of a modulator affecting the one or more increased or decreased biomarker protein or biomarker RNA expression levels. Therefore, in some embodiments, the method includes administering to the subject an effective amount of a modulator of a modulator of the LPA-associated disease marker protein set forth in Table 1 or Table 2. In embodiments, the method includes administering to the subject an effective amount of a modulator of a modulator of the LPA-associated disease marker protein of SEQ ID NO:1-202. In embodiments, the modulator is an antagonist. In embodiments, the antagonist is a peptide, small molecule, nucleic acid, antibody or aptamer. In embodiments, the expression level of the LPA-associated disease marker protein set forth in Table 1 or Table 2 is elevated relative to a standard control. In embodiments, the expression level of the LPA-associated disease marker protein of SEQ ID NO:1-202 is elevated relative to a standard control. In embodiments, the modulator is an agonist. In embodiments, the agonist is a peptide, small molecule, nucleic acid, antibody or aptamer. In embodiments, the expression level of the LPA-associated disease marker protein of SEQ ID NO:1-202 is decreased relative to a standard control. In embodiments, the expression level of the LPA-associated disease marker protein set forth in Table 1 or Table 2 is decreased relative to a standard control. In embodiments, the method includes administering to the subject an effective amount of a further therapeutic agent.

[0090] The methods provided herein may include combinatorial treatment of a LPA-associated disease patient with a modulator of one or more LPA-associated disease marker proteins and a fibrotic pulmonary disease treatment. Thus, the method includes administering to the subject an effective amount of a further therapeutic agent. Exemplary therapeutic agents include, but are not limited to, the agents selected from the group consisting of steroids (including but not limited to prednisolone), cytotoxic agents (including but not limited to azathioprine and cyclophosphamide), bardoxolone, LPA agonists (including but not limited to AM152); Torisel (temsirolimus); PI3K inhibitors; pentraxin or serum amyloid P (including but not limited to Pentraxin-2 (PTX-2 or PRM-151)); MEK inhibitors (including but not limited to ARRY-162 and ARRY-300); p38 inhibitors; PAI-1 inhibitors (including but not limited to Tiplaxtinin); agents that reduce the activity of transforming growth factor-beta (TGF-β) (including but not limited to GC-1008 (Genzyme/Medlmmune); lerdelimumab (CAT-152; Trabio, Cambridge Antibody); metelimumab (CAT-192, Cambridge Antibody); LY-2157299 (Eli Lilly); ACU-HTR-028 (Opko Health)) including antibodies that target one or more TGF-β isoforms, inhibitors of TGF-β receptor kinases TGFBR1 (ALK5) and TGFBR2, and modulators of post-receptor signaling pathways; chemokine receptor signaling; endothelin receptor antagonists including inhibitors that target both endothelin receptor A and B and those that selectively target endothelin receptor A (including but not limited to ambrisentan; avosentan; bosentan; clazosentan; darusentan; BQ-153; FR-139317, L-744453; macitentan; PD-145065; PD-156252; PD163610; PS-433540; S-0139; sitaxentan sodium; TBC-3711; zibotentan); agents that reduce the activity of connective tissue growth factor (CTGF) (including but not limited to FG-3019, FibroGen), and including other CTGF-neutralizing antibodies; matrix metalloproteinase (MMP) inhibitors (including but not limited to MMPI-12, PUP-1 and tigapotide triflutate); agents that reduce the activity of epidermal growth factor receptor (EGFR) including but not limed to erlotinib, gefitinib, BMS-690514, cetuximab, antibodies targeting EGF receptor, inhibitors of EGF receptor kinase, and modulators of post-receptor signaling pathways; agents that reduce the activity of platelet derived growth factor (PDGF) (including but not limited to Imatinib mesylate (Novartis)) and also including PDGF neutralizing antibodies, antibodies targeting PDGF receptor (PDGFR), inhibitors of PDGFR kinase activity, and post-receptor signaling pathways; agents that reduce the activity of vascular endothelial growth factor (VEGF) (including but not limited to axitinib, bevacizumab, BIBF-1120, CDP-791, CT-322, IMC-18F1, PTC-299, and ramucirumab) and also including VEGF-neutralizing antibodies, antibodies targeting the VEGF receptor 1 (VEGFR1, Flt-1) and VEGF receptor 2 (VEGFR2, KDR), the soluble form of VEGFR1 (sFlt) and derivatives thereof which neutralize VEGF, and inhibitors of VEGF receptor kinase activity; inhibitors of multiple receptor kinases such as BIBF-1120 which inhibits receptor kinases for vascular endothelial growth factor, fibroblast growth factor, and platelet derived growth factor; agents that interfere with integrin function (including but not limited to STX-100 and IMGN-388) and also including integrin targeted antibodies; agents that interfere with the pro-fibrotic activities of IL-4 (including but not limited to AER-001, AMG-317, APG-201, and sIL-4Rα) and IL-13 (including but not limited to AER-001, AMG-317, anrukinzumab, CAT-354, cintredekin besudotox, MK-6105, QAX-576, SB-313, SL-102, and TNX-650) and also including neutralizing anti-bodies to either cytokine, antibodies that target IL-4 receptor or IL-13 receptor, the soluble form of IL-4 receptor or derivatives thereof that is reported to bind and neutralize both IL-4 and IL-13, chimeric proteins including all or part of IL-13 and a toxin particularly pseudomonas endotoxin, signaling though the JAK-STAT kinase pathway; agents that interfere with epithelial mesenchymal transition including inhibitors of mTor (including but not limited to AP-23573 or rapamycin); agents that reduce levels of copper such as tetrathiomolybdate; agents that reduce oxidative stress including N-acetyl cysteine and tetrathiomolybdate; and interferon gamma, inhibitors of phosphodiesterase 4 (PDE4) (including but not limited to Roflumilast); inhibitors of phosphodiesterase 5 (PDES) (including but not limited to mirodenafil, PF-4480682, sildenafil citrate, SLx-2101, tadalafil, udenafil, UK-369003, vardenafil, and zaprinast); or modifiers of the arachidonic acid pathway including cyclooxygenase and 5-lipoxegenase inhibitors (including but not limited to Zileuton), compounds that reduce tissue remodeling or fibrosis including prolyl hydrolase inhibitors (including but not limited to 1016548, CG-0089, FG-2216, FG-4497, FG-5615, FG-6513, fibrostatin A (Takeda), lufironil, P-1894B, and safironil) and peroxisome proliferator-activated receptor (PPAR)-gamma agonists (including but not limited to pioglitazone and rosiglitazone), and combinations thereof. In some embodiments, the therapeutic agent is an anti-fibrotic drug. In some embodiments, the therapeutic agent is an idiopathic pulmonary fibrosis drug. In other embodiment, the idiopathic pulmonary fibrosis drug is a mucolytic drug.

[0091] In embodiments, the LPA-associated disease marker protein is SEQ ID NO:9, SEQ ID NO:23, SEQ ID NO:32, SEQ ID NO:47, SEQ ID NO:58, SEQ ID NO:90, SEQ ID NO:93, SEQ ID NO:102, SEQ ID NO:118, SEQ ID NO:131, SEQ ID NO:136, SEQ ID NO:139, SEQ ID NO:141, SEQ ID NO:143, SEQ ID NO:149, SEQ ID NO:152, SEQ ID NO:160, SEQ ID NO:164, SEQ ID NO:183 or SEQ ID NO:185.

[0092] In another aspect, a method of determining an expression level of an LPA-associated disease marker RNA set forth in Table 3 or Table 4 in a subject that has or is at risk for developing an LPA-associated disease is provided. The method includes obtaining a biological sample from the subject and determining an expression level of an LPA-associated disease marker RNA set forth in Table 3 or Table 4 in the biological sample.

[0093] In another aspect, a method of determining an expression level of an LPA-associated disease marker RNA of SEQ ID NO:203-499 in a subject that has or is at risk for developing an LPA-associated disease is provided. The method includes (i) obtaining a biological sample from the subject; and (ii) determining an expression level of an LPA-associated disease marker RNA of SEQ ID NO:203-499 in the biological sample.

[0094] For the methods of determining an expression level of an LPA-associated diseases marker RNA, the determining may include (a) contacting the LPA-associated disease marker RNA with a marker RNA binding agent in the biological sample, thereby forming a disease marker RNA-binding agent complex; and (b) detecting the disease marker RNA-binding agent complex. In embodiments, the marker RNA binding agent includes a detectable moiety. In embodiments, the marker RNA binding agent includes a capturing moiety. In embodiments, the capturing moiety is a cleavable capturing moiety. In embodiments, the detecting includes contacting the disease marker RNA-binding agent complex with a capturing agent, thereby forming a captured disease marker RNA-binding agent complex. In embodiments, the detecting includes (1) contacting the captured disease marker RNA-binding agent complex with a tagging moiety; thereby forming a tagged disease marker RNA-binding agent complex; and (2) separating the tagged disease marker RNA-binding agent complex from the biological sample. In embodiments, the detecting further includes after the separating of step (2) separating the capturing binding agent from the tagged disease marker RNA-binding agent complex, thereby forming a cleaved disease marker RNA-binding agent complex. In embodiments, the detecting includes (3) separating the marker RNA binding agent from the cleaved disease marker RNA-binding agent complex; thereby forming a released marker RNA binding agent; and (4) determining an amount of the released marker RNA binding agent.

[0095] In embodiments, the method includes selecting a subject that has or is at risk for developing an LPA-associated disease. In embodiments, the biological sample is a blood-derived biological sample, a urine-derived biological sample or a saliva-derived biological sample of the subject. In embodiments, the blood-derived biological sample is whole blood, serum or plasma.

[0096] In embodiments, the method includes administering to the subject an effective amount of a modulator of the LPA-associated disease marker RNA set forth in Table 3 or Table 4. In embodiments, the method includes administering to the subject an effective amount of a modulator of the LPA-associated disease marker RNA of SEQ ID NO:203-499. In embodiments, the modulator is an antagonist. In embodiments, the antagonist is a peptide, small molecule, nucleic acid, antibody or aptamer. In embodiments, the expression level of the LPA-associated disease marker RNA set forth in Table 3 or Table 4 is elevated relative to a standard control. In embodiments, the expression level of the LPA-associated disease marker RNA of SEQ ID NO:203-499 is elevated relative to a standard control. In embodiments, the modulator is an agonist. In embodiments, the agonist is a peptide, small molecule, nucleic acid, antibody or aptamer. In embodiments, the expression level of the LPA-associated disease marker RNA set forth in Table 3 or Table 4 is decreased relative to a standard control. In embodiments, the expression level of the LPA-associated disease marker RNA of SEQ ID NO:203-499 is decreased relative to a standard control. In embodiments, the method includes administering to the subject an effective amount of a further therapeutic agent.

[0097] In embodiments, the LPA-associated disease marker RNA is SEQ ID NO:209, SEQ ID NO:214, SEQ ID NO:216, SEQ ID NO:217, SEQ ID NO:218, SEQ ID NO:219, SEQ ID NO:222, SEQ ID NO:236, SEQ ID NO:237, SEQ ID NO:242, SEQ ID NO:243, SEQ ID NO:267, SEQ ID NO:269, SEQ ID NO:270, SEQ ID NO:271, SEQ ID NO:303, SEQ ID NO:309, SEQ ID NO:353, SEQ ID NO:364, SEQ ID NO:378, SEQ ID NO:396, SEQ ID NO:417, SEQ ID NO:432 or SEQ ID NO:448.

[0098] In another aspect, a method of determining whether a subject has or is at risk of developing an LPA-associated disease is provided. The method includes (i) detecting an expression level of one or more LPA-associated disease marker proteins set forth in Table 1 or Table 2 in a subject. (ii) It is determined whether the expression level is increased or decreased relative to a standard control, wherein an elevated expression level of an LPA-associated disease marker protein set forth in Table 1 or Table 2 or a decreased expression level of an LPA-associated disease marker protein set forth in Table 1 or Table 2 relative to the standard control indicates that the subject has or is at risk of developing an LPA-associated disease. Based at least in part on the expression level in step (ii), it is determined whether the subject has or is at risk for developing an LPA-associated disease.

[0099] In another aspect, a method of determining whether a subject has or is at risk of developing an LPA-associated disease is provided. The method includes (i) detecting an expression level of one or more LPA-associated disease marker proteins of SEQ ID NO:1-202 in a subject. (ii) It is determined whether the expression level is increased or decreased relative to a standard control, wherein an elevated expression level of an LPA-associated disease marker protein of SEQ ID NO:1-202 or a decreased expression level of an LPA-associated disease marker protein of SEQ ID NO:1-202 relative to the standard control indicates that the subject has or is at risk of developing an LPA-associated disease. And (iii) based at least in part on the expression level in step (ii), determining whether the subject has or is at risk for developing an LPA-associated disease.

[0100] In embodiments, the method includes selecting a subject that has or is at risk for developing an LPA-associated disease. In embodiments, the expression level of one or more LPA-associated disease marker proteins set forth in Table 1 or Table 2 is detected from a biological sample of the subject. In embodiments, the expression level of one or more LPA-associated disease marker proteins of SEQ ID NO:1-202 is detected from a biological sample of the subject. In embodiments, the biological sample is a blood-derived biological sample, a urine-derived biological sample or a saliva-derived biological sample of the subject. In embodiments, the blood-derived biological sample is whole blood, serum or plasma. In embodiments, the method includes administering to the subject an effective amount of a modulator of the LPA-associated disease marker protein set forth in Table 1 or Table 2. In embodiments, the method includes administering to the subject an effective amount of a modulator of the LPA-associated disease marker protein of SEQ ID NO:1-202. In embodiments, the modulator is an antagonist. In embodiments, the antagonist is a peptide, small molecule, nucleic acid, antibody or aptamer. In embodiments, the modulator is an agonist. In embodiments, the agonist is a peptide, small molecule, nucleic acid, antibody or aptamer. In embodiments, the method includes administering to the subject an effective amount of a further therapeutic agent.

[0101] In another aspect, a method of determining whether a subject has or is at risk of developing an LPA-associated disease is provided. The method includes (i) detecting an expression level of one or more LPA-associated disease marker RNAs set forth in Table 3 or Table 4 in a subject. (ii) It is determined whether the expression level is increased or decreased relative to a standard control, wherein an elevated expression level of an LPA-associated disease marker RNA set forth in Table 3 or Table 4 or a decreased expression level of an LPA-associated disease marker RNA set forth in Table 3 or Table 4 relative to the standard control indicates that the subject has or is at risk of developing an LPA-associated disease. (iii) Based at least in part on the expression level in step (ii), it is determined whether the subject has or is at risk for developing an LPA-associated disease.

[0102] In another aspect, a method of determining whether a subject has or is at risk of developing an LPA-associated disease is provided. The method includes (i) detecting an expression level of one or more LPA-associated disease marker RNAs of SEQ ID NO:203-499 in a subject. (ii) It is determined whether the expression level is increased or decreased relative to a standard control, wherein an elevated expression level of an LPA-associated disease marker RNA of SEQ ID NO:203-499 or a decreased expression level of an LPA-associated disease marker RNA of SEQ ID NO:203-499 relative to the standard control indicates that the subject has or is at risk of developing an LPA-associated disease. And (iii) based at least in part on the expression level in step (ii), determining whether the subject has or is at risk for developing an LPA-associated disease.

[0103] In embodiments, the method includes selecting a subject that has or is at risk for developing an LPA-associated disease. In embodiments, the expression level of one or more LPA-associated disease marker RNAs set forth in Table 3 or Table 4 is detected from a biological sample of the subject. In embodiments, the expression level of one or more LPA-associated disease marker RNAs of SEQ ID NO:203-499 is detected from a biological sample of the subject. In embodiments, the biological sample is a blood-derived biological sample, a urine-derived biological sample or a saliva-derived biological sample of the subject. In embodiments, the blood-derived biological sample is whole blood, serum or plasma. In embodiments, the method includes administering to the subject an effective amount of a modulator of the LPA-associated disease marker RNA set forth in Table 3 or Table 4. In embodiments, the method includes administering to the subject an effective amount of a modulator of the LPA-associated disease marker RNA of SEQ ID NO:203-499. In embodiments, the modulator is an antagonist. In embodiments, the antagonist is a peptide, small molecule, nucleic acid, antibody or aptamer. In embodiments, the modulator is an agonist. In embodiments, the agonist is a peptide, small molecule, nucleic acid, antibody or aptamer. In embodiments, the method includes administering to the subject an effective amount of a further therapeutic agent.

[0104] In another aspect, a method of determining an LPA-associated disease activity in a patient is provided. The method includes (i) determining a first expression level of a protein set forth in Table 1 or Table 2 in the patient at a first time point. (ii) A second expression level of a protein set forth in Table 1 or Table 2 in the patient is determined at a second time point. (iii) The second expression level of a protein set forth in Table 1 or Table 2 is compared to the first expression level of a protein set forth in Table 1 or Table 2, thereby determining the LPA-associated disease activity in the patient.

[0105] In another aspect, a method of determining an LPA-associated disease activity in a patient is provided. The method includes (i) determining a first expression level of a protein of SEQ ID NO:1-202 in the patient at a first time point. (ii) A second expression level of a protein of SEQ ID NO:1-202 in the patient is determined at a second time point. (iii) The second expression level of a protein of SEQ ID NO:1-202 is compared to the first expression level of a protein of SEQ ID NO:1-202, thereby determining the LPA-associated disease activity in the patient.

[0106] In another aspect, a method of determining an LPA-associated disease activity in a patient is provided. The method includes (i) determining a first expression level of an RNA set forth in Table 3 or Table 4 in the patient at a first time point. (ii) A second expression level of an RNA set forth in Table 3 or Table 4 is determined in the patient at a second time point. (iii) The second expression level of an RNA set forth in Table 3 or Table 4 is compared to the first expression level of an RNA set forth in Table 3 or Table 4, thereby determining the LPA-associated disease activity in the patient.

[0107] In another aspect, a method of determining an LPA-associated disease activity in a patient is provided. The method includes (i) determining a first expression level of an RNA of SEQ ID NO:203-499 in the patient at a first time point. (ii) A second expression level of an RNA of SEQ ID NO:203-499 is determined in the patient at a second time point. (iii) The second expression level of an RNA of SEQ ID NO:203-499 is compared to the first expression level of an RNA of SEQ ID NO:203-499, thereby determining the LPA-associated disease activity in the patient.

[0108] In another aspect, a method of determining whether an LPA-associated disease patient is at risk for progression of the LPA-associated disease is provided. The method includes (i) detecting an expression level of one or more LPA-associated disease marker proteins set forth in Table 1 or Table 2 in an LPA-associated disease patient. (ii) It is determined whether the expression level is modulated relative to a standard control, wherein a modulated expression level of an LPA-associated disease marker protein set forth in Table 1 or Table 2 relative to the standard control indicates that the LPA-associated disease patient is at risk for progression of the LPA-associated disease. (iii) Based at least in part on the expression level in step (ii), it is determined whether the LPA-associated disease patient is at risk for progression of the LPA-associated disease.

[0109] In another aspect, a method of determining whether an LPA-associated disease patient is at risk for progression of the LPA-associated disease is provided. The method includes (i) detecting an expression level of one or more LPA-associated disease marker proteins set forth of SEQ ID NO:1-202 in an LPA-associated disease patient. (ii) It is determined whether the expression level is modulated relative to a standard control, wherein a modulated expression level of an LPA-associated disease marker protein of SEQ ID NO:1-202 relative to the standard control indicates that the LPA-associated disease patient is at risk for progression of the LPA-associated disease; and (iii) based at least in part on the expression level in step (ii), determining whether the LPA-associated disease patient is at risk for progression of the LPA-associated disease.

[0110] In another aspect, a method of determining whether an LPA-associated disease patient is at risk for progression of the LPA-associated disease is provided. The method includes (i) detecting an expression level of one or more LPA-associated disease marker RNAs set forth in Table 3 or Table 4 in an LPA-associated disease patient. (ii) It is determined whether the expression level is modulated relative to a standard control, wherein a modulated expression level of an LPA-associated disease marker RNA set forth in Table 3 or Table 4 relative to the standard control indicates that the LPA-associated disease patient is at risk for progression of the LPA-associated disease. (iii) Based at least in part on the expression level in step (ii), it is determined whether the LPA-associated disease patient is at risk for progression of the LPA-associated disease.

[0111] In another aspect, a method of determining whether an LPA-associated disease patient is at risk for progression of the LPA-associated disease is provided. The method includes (i) detecting an expression level of one or more LPA-associated disease marker RNAs of SEQ ID NO:203-499 in an LPA-associated disease patient. (ii) It is determined whether said expression level is modulated relative to a standard control, wherein a modulated expression level of an LPA-associated disease marker RNA of SEQ ID NO:203-499 relative to the standard control indicates that the LPA-associated disease patient is at risk for progression of said LPA-associated disease; and (iii) based at least in part on the expression level in step (ii), determining whether the LPA-associated disease patient is at risk for progression of the LPA-associated disease.

[0112] In another aspect, a method of determining whether an LPA-associated disease patient is at risk for progression of the LPA-associated disease is provided. The method includes (i) determining a first expression level of a protein set forth in Table 1 or Table 2 in the patient at a first time point. (ii) A second expression level of a protein set forth in Table 1 or Table 2 in the patient is determined at a second time point. (iii) The second expression level of a protein set forth in Table 1 or Table 2 is compared to the first expression level of a protein set forth in Table 1 or Table 2, wherein when the second expression level of a protein set forth in Table 1 or Table 2 is different from the first level of a protein set forth in Table 1 or Table 2, the patient is at risk for progression of the LPA-associated disease.

[0113] In another aspect, a method of determining whether an LPA-associated disease patient is at risk for progression of the LPA-associated disease is provided. The method includes (i) determining a first expression level of a protein of SEQ ID NO:1-202 in the patient at a first time point. (ii) A second expression level of a protein of SEQ ID NO:1-202 in the patient is determined at a second time point. (iii) The second expression level of a protein of SEQ ID NO:1-202 is compared to the first expression level of a protein of SEQ ID NO:1-202, wherein when the second expression level of a protein of SEQ ID NO:1-202 is different from the first level of a protein of SEQ ID NO:1-202, the patient is at risk for progression of the LPA-associated disease. T

[0114] In another aspect, a method of determining whether an LPA-associated disease patient is at risk for progression of the LPA-associated disease is provided. The method includes (i) determining a first expression level of an RNA set forth in Table 3 or Table 4 in the patient at a first time point. (ii) A second expression level of an RNA set forth in Table 3 or Table 4 in the patient is determined at a second time point. (iii) The second expression level of an RNA set forth in Table 3 or Table 4 is compared to the first expression level of an RNA set forth in Table 3 or Table 4, wherein when the second expression level of an RNA set forth in Table 3 or Table 4 is different from the first level of an RNA set forth in Table 3 or Table 4, the patient is at risk for progression of the LPA-associated disease.

[0115] In another aspect, a method of determining whether an LPA-associated disease patient is at risk for progression of the LPA-associated disease is provided. The method includes (i) determining a first expression level of an RNA of SEQ ID NO:203-499 in the patient at a first time point. (ii) A second expression level of an RNA of SEQ ID NO:203-499 in the patient is determined at a second time point. (iii) The second expression level of an RNA of SEQ ID NO:203-499 is compared to the first expression level of an RNA of SEQ ID NO:203-499, wherein when the second expression level of an RNA of SEQ ID NO:203-499 is different from the first level of an RNA of SEQ ID NO:203-499, the patient is at risk for progression of the LPA-associated disease.

[0116] The patient at risk for progression of the LPA-associated disease may have received treatment for the LPA-associated disease prior to the determining in step (i). Where the patient at risk for progression of the LPA-associated disease has received treatment for the LPA-associated disease prior to the determining in step (i) the treatment may be altered after the determining in step (i) and before the determining in step (ii). Alternatively, the patient at risk for progression of the LPA-associated disease may not have received treatment for the LPA-associated disease prior to the determining in step (i). Where the patient at risk for progression of the LPA-associated disease has not received treatment for the LPA-associated disease prior to the determining in step (i) the patient may receive treatment after the determining in step (i). Thus, in some embodiments, the method includes administering an LPA-associated disease treatment after the determining in step (i). In some embodiments, the method further includes determining a rate of progression of the LPA-associated disease in the patient based on the comparing.

[0117] In embodiments, the determining the first expression level of a protein of SEQ ID NO:1-202 or an RNA of SEQ ID NO:203-499 and the second expression level of a protein of SEQ ID NO:1-202 or an RNA of SEQ ID NO:203-499 includes normalizing the first expression level of a protein of SEQ ID NO:1-202 or an RNA of SEQ ID NO:203-499 and the second expression level of a protein of SEQ ID NO:1-202 or an RNA of SEQ ID NO:203-499 to a protein or RNA expressed from a standard gene in the patient. In some further embodiments, the standard gene is a so-called housekeeping gene, as is commonly known in the art, such as GAPDH or beta-actin. In embodiments, the standard gene is non-differentially expressed. Where the standard gene is non-differentially expressed, the expression level of the standard gene remains unchanged over the time course of the disease. In some embodiment, the first expression level is detected from a first biological sample of the subject and the second expression level is detected from a second biological sample of the subject. In some embodiment, the first biological sample is a first bodily fluid sample and the second biological sample is a second bodily fluid sample.

### III. Methods of Treatment

[0118] In another aspect, a method of treating an LPA-associated disease in a subject in need thereof is provided. The method includes administering to the subject an effective amount of an modulator of an LPA-associated disease marker protein set forth in Table 1 or Table 2, thereby treating an LPA-associated disease in the subject.

[0119] In another aspect, a method of treating an LPA-associated disease in a subject in need thereof is provided. The method includes administering to the subject an effective amount of an modulator of an LPA-associated disease marker protein of SEQ ID NO:1-202, thereby treating an LPA-associated disease in the subject.

[0120] In another aspect, a method of treating an LPA-associated disease in a subject in need thereof is provided. The method includes administering to the subject an effective amount of an modulator of an LPA-associated disease marker RNA set forth in Table 3 or Table 4, thereby treating an LPA-associated disease in the subject.

[0121] In another aspect, a method of treating an LPA-associated disease in a subject in need thereof is provided. The method includes administering to the subject an effective amount of an modulator of an LPA-associated disease marker RNA of SEQ ID NO:203-499, thereby treating an LPA-associated disease in the subject.

[0122] In another aspect, a method of treating an LPA-associated disease in a subject in need thereof is provided. The method includes (i) determining whether a subject expresses an elevated level or a decreased level of an LPA-associated disease marker protein set forth in Table 1 or Table 2 relative to a standard control. (ii) When an elevated expression level or a decreased expression level of the LPA-associated disease marker protein set forth in Table 1 or Table 2 is found relative to the standard control, an LPA-associated disease treatment, an antagonist or an agonist of an LPA-associated disease marker protein set forth in Table 1 or Table 2 is administered to the subject, thereby treating the subject.

[0123] In another aspect, a method of treating an LPA-associated disease in a subject in need thereof is provided. The method includes (i) determining whether a subject expresses an elevated level or a decreased level of an LPA-associated disease marker protein of SEQ ID NO:1-202 relative to a standard control. And (ii) when an elevated expression level or a decreased expression level of the LPA-associated disease marker protein of SEQ ID NO:1-202 is found relative to the standard control, administering to the subject an LPA-associated disease treatment, an antagonist or an agonist of an LPA-associated disease marker protein of SEQ ID NO:1-202, thereby treating the subject.

[0124] In some embodiments, the determining whether the expression level is modulated relative to a standard control includes determining whether the expression level is elevated or suppressed relative to other LPA-associated disease patients. Therefore a standard control as referred to herein may include or may be an average value gathered from a population of LPA-associated disease patients. In other embodiments, a standard control is an average value gathered from a population of normal patients.

[0125] In another aspect, a method of treating an LPA-associated disease in a subject in need thereof is provided. The method includes (i) determining whether a subject expresses an elevated level or a decreased level of an LPA-associated disease marker RNA set forth in Table 3 or Table 4 relative to a standard control. (ii) When an elevated expression level or a decreased expression level of the LPA-associated disease marker RNA set forth in Table 3 or Table 4 is found relative to the standard control, an LPA-associated disease treatment, an antagonist or an agonist of an LPA-associated disease marker RNA set forth in Table 3 or Table 4 is administered to the subject, thereby treating the subject.

[0126] In another aspect, a method of treating an LPA-associated disease in a subject in need thereof is provided. The method includes (i) determining whether a subject expresses an elevated level or a decreased level of an LPA-associated disease marker RNA of SEQ ID NO:203-499 relative to a standard control. And (ii) when an elevated expression level or a decreased expression level of the LPA-associated disease marker RNA of SEQ ID NO:203-499 is found relative to the standard control, administering to the subject an LPA-associated disease treatment, an antagonist or an agonist of an LPA-associated disease marker RNA of SEQ ID NO:203-499, thereby treating the subject.

### IV. Kits and Compositions

[0127] The invention provides kits for detection of LPA-associated disease marker proteins or LPA-associated disease marker RNAs or fragments thereof in a subject. The kit can be for personal use or provided to medical professionals. The kit can be a kit for diagnosing or prognosing and LPA-associated disease, or for monitoring the progression of disease or the efficacy of treatment.

[0128] In one aspect, a kit is provided. The kit includes (a) a marker protein binding agent (e.g., an aptamer, optionally labeled) capable of binding to a substance within a biological sample (e.g., whole blood, serum or plasma) from a human subject having or at risk of developing an LPA-associated disease; wherein the substance is an LPA-associated disease marker protein of SEQ ID NO:1-202 or fragment thereof. And (b) a detecting reagent or a detecting apparatus capable of indicating binding of the marker protein binding agent to the substance.

[0129] In another aspect, a kit is provided. The kit includes (a) a marker RNA binding agent capable of binding to a substance within a biological sample from a human subject having or at risk of developing an LPA-associated disease; wherein the substance is an LPA-associated disease marker RNA of SEQ ID NO:203-499 or fragment thereof. And (b) a detecting reagent or a detecting apparatus capable of indicating binding of the marker RNA binding agent to the substance.

[0130] The kits provided herein can further include assay containers (tubes), buffers, or enzymes necessary for carrying out the detection assay. In embodiments, the kit further includes a sample collection device for collecting a sample from a subject. In embodiments, the human subject has an LPA-associated disease.

[0131] In embodiments, the kit includes components to examine more than one LPA-associated disease marker protein or RNA or fragment thereof. For example, the kit can include more than one marker protein binding agent or marker RNA binding agent capable of binding to one or more LPA-associated disease marker proteins or fragments thereof of SEQ ID NO:1-202 or one or more LPA-associated disease marker RNAs or fragments thereof of SEQ ID NO:203-499. In embodiments, the kit includes a plurality of marker protein binding agents or a plurality of marker RNA binding agents. Where the kit includes a plurality of marker protein binding agents or marker RNA binding agents a plurality of LPA-associated disease marker proteins or RNAs or fragments thereof (e.g., of SEQ ID NO:1-202 or SEQ ID NO:203-499) are detected.

[0132] The kit will generally include at least one vial, test tube, flask, bottle, syringe or other container means, into which the testing agent, can be suitably reacted or aliquoted. Kits can also include components for comparing results such as a suitable control sample, for example a positive and/or negative control. The kit can also include a collection device for collecting and/or holding the sample from the subject. The collection device can include a sterile swab or needle (for collecting blood), and/or a sterile tube (e.g., for holding the swab or a bodily fluid sample).

[0133] In another aspect, a complex in vitro is provided. The complex includes a marker protein binding agent bound to a LPA-associated disease marker protein of SEQ ID NO:1-202 or fragment thereof, wherein the LPA-associated disease marker protein is extracted from a human subject having or at risk of developing an LPA-associated disease.

[0134] In another aspect, a complex in vitro is provided. The complex includes a marker RNA binding agent bound to a LPA-associated disease marker RNA of SEQ ID NO:203-499 or fragment thereof, wherein the LPA-associated disease marker RNA is extracted from a human subject having or at risk of developing an LPA-associated disease.

### V. Methods of Detection

[0135] The methods provided herein include the step of determining (detecting) an expression level of an LPA-associated disease marker protein or fragment thereof or an LPA-associated disease marker RNA or fragment thereof. Methods for detecting and identifying proteins or RNAs and their interactions with other proteins or nucleic acid molecules involve conventional molecular biology, microbiology, and recombinant DNA techniques within the skill of the art. Such techniques are explained fully in the literature (see, e.g., Sambrook, Fritsch & Maniatis, Molecular Cloning: A Laboratory Manual, Second Edition 1989, Cold Spring Harbor Laboratory Press, Cold Spring Harbor, N.Y.; Animal Cell Culture, R. I. Freshney, ed., 1986).

[0136] “Determining an expression level of a protein”, “determining a level of expression of a protein”, “determining an expression level of an RNA” or “determining a level of expression of an RNA” as provided herein includes methods and technologies well known in the art. For example, capture arrays for expression profiling may be used to determine an expression level of a protein or an RNA. Capture arrays employ high affinity capture reagents, such as conventional antibodies, single domains, engineered scaffolds, peptides, nucleic acid aptamers or complementary nucleic acids (e.g., RNA or DNA), to bind and detect specific target ligands in high throughput manner. Antibody arrays have the required properties of specificity and acceptable background, and some are available commercially (BD Biosciences, San Jose, Calif.; Clontech, Mountain View, Calif.; BioRad; Sigma, St. Louis, Mo.). Antibodies for capture arrays are made either by conventional immunization (polyclonal sera and hybridomas), or as recombinant fragments, usually expressed in E. coli, after selection from phage or ribosome display libraries (Cambridge Antibody Technology, Cambridge, UK; Biolnvent, Lund, Sweden; Affitech, Walnut Creek, Calif.; Biosite, San Diego, Calif.). In addition to the conventional antibodies, Fab and scFv fragments, single V-domains from camelids or engineered human equivalents (Domantis, Waltham, Mass.) are optionally useful in arrays.

[0137] The term scaffold refers to ligand-binding domains of proteins, which are engineered into multiple variants capable of binding diverse target molecules with antibody-like properties of specificity and affinity. The variants are produced in a genetic library format and selected against individual targets by phage, bacterial or ribosome display. Such ligand-binding scaffolds or frameworks include Affibodies based on S. aureus protein A (Affibody, Bromma, Sweden), Trinectins based on fibronectins (Phylos, Lexington, Mass.) and Anticalins based on the lipocalin structure (Pieris Proteolab, Freising-Weihenstephan, Germany). These are used on capture arrays in a similar fashion to antibodies and have advantages of robustness and ease of production.

[0138] Nonprotein capture molecules, notably the nucleic acid aptamers which bind protein ligands with high specificity and affinity, are also used in arrays (SomaLogic, Boulder, Colo.). Aptamers are selected from libraries of oligonucleotides by the Selex™ procedure (SomaLogic, Boulder, Colo.) and their interaction with protein is enhanced by covalent attachment, through incorporation of brominated deoxyuridine and UV-activated crosslinking (photoaptamers). Photocrosslinking to ligand reduces the cross reactivity of aptamers due to the specific steric requirements. Aptamers have the advantages of ease of production by automated oligonucleotide synthesis and the stability and robustness of DNA; on photoaptamer arrays, universal fluorescent protein stains are used to detect binding. Other nonprotein capture molecules include complementary nucleic acid molecules (e.g., RNA, DNA) capable of hybridizing to the marker RNA. In embodiments, the complementary nucleic acid molecules are attached to a detectable moiety.

[0139] Protein analytes binding to antibody arrays are detected directly or indirectly, for example, via a secondary antibody. Direct labeling is used for comparison of different samples with different colors. Where pairs of antibodies directed at the same protein ligand are available, sandwich immunoassays provide high specificity and sensitivity and are therefore the method of choice for low abundance proteins such as cytokines; they also give the possibility of detection of protein modifications. Label-free detection methods, including mass spectrometry, surface plasmon resonance and atomic force microscopy, avoid alteration of ligand. What is required from any method is optimal sensitivity and specificity, with low background to give high signal to noise. Since analyte concentrations cover a wide range, sensitivity has to be tailored appropriately. Serial dilution of the sample or use of antibodies of different affinities are solutions to this problem. Proteins of interest are frequently those in low concentration in body fluids and extracts, requiring detection in the pg range or lower, such as cytokines or the low expression products in cells.

[0140] An alternative to an array of capture molecules is one made through molecular imprinting technology, in which peptides (e.g., from the C-terminal regions of proteins) are used as templates to generate structurally complementary, sequence-specific cavities in a polymerizable matrix; the cavities can then specifically capture (denatured) proteins that have the appropriate primary amino acid sequence (ProteinPrint™, Aspira Biosystems, Burlingame, Calif.).

[0141] Another methodology which is useful diagnostically and in expression profiling is the ProteinChip® array (Ciphergen, Fremont, Calif.), in which solid phase chromatographic surfaces bind proteins with similar characteristics of charge or hydrophobicity from mixtures such as plasma or tumor extracts, and SELDI-TOF mass spectrometry is used to detection the retained proteins.

[0142] Large-scale functional chips have been constructed by immobilizing large numbers of purified proteins and are used to assay a wide range of biochemical functions, such as protein interactions with other proteins, drug-target interactions, enzyme-substrates, etc. Generally they require an expression library, cloned into E. coli, yeast or similar from which the expressed proteins are then purified, e.g., via a His tag and immobilized. Cell free protein transcription/translation is a viable alternative for synthesis of proteins which do not express well in bacterial or other in vivo systems.

[0143] In embodiments, determining (detecting) an expression level of an LPA-associated disease marker protein or fragment thereof as provided herein includes contacting an LPA-associated disease marker protein with a marker protein binding agent. A “marker protein binding agent” as provided herein refers to a substance capable of binding an LPA-associated disease marker protein. The marker protein binding agent may be a nucleic acid or a protein. In embodiments, the marker protein binding agent is an aptamer. In embodiments, the marker protein binding agent is a peptide. In embodiments, the marker protein binding agent is a small molecule. In embodiments, the marker protein binding agent is an antibody. In embodiments, the LPA-associated disease marker protein or fragment thereof is contacted with a marker protein binding agent in a biological sample (e.g., whole blood, serum or plasma). In embodiments, the marker protein binding agent includes a detectable moiety. In embodiments, the detectable moiety is a fluorescent moiety. In embodiments, the marker protein binding agent includes a capturing moiety. A “capturing moiety” refers to a protein or nucleic acid, which is covalently, through a linker or a chemical bond, or noncovalently attached to the marker protein binding agent and is capable of interacting with a capturing agent. An example of a capturing moiety useful for the methods provided herein is biotin. In embodiments, the capturing moiety is biotin. In embodiments, the capturing moiety is a cleavable capturing moiety. In embodiments, the capturing moiety is photocleavable biotin.

[0144] In embodiments, determining (detecting) an expression level of an LPA-associated disease marker RNA or fragment thereof as provided herein includes contacting LPA-associated disease marker RNA with a marker RNA binding agent. A “marker RNA binding agent” as provided herein refers to a substance capable of binding an LPA-associated disease marker RNA. The marker RNA binding agent may be a nucleic acid or a protein. In embodiments, the marker RNA binding agent is an aptamer. In embodiments, the marker RNA binding agent is a peptide. In embodiments, the marker RNA binding agent is a small molecule. In embodiments, the marker RNA binding agent is an antibody. In embodiments, the LPA-associated disease marker RNA or fragment thereof is contacted with a marker RNA binding agent in a biological sample (e.g., whole blood, serum or plasma). In embodiments, the marker RNA binding agent includes a detectable moiety. In embodiments, the detectable moiety is a fluorescent moiety. In embodiments, the marker RNA binding agent includes a capturing moiety. A “capturing moiety” refers to a protein or nucleic acid, which is covalently, through a linker or a chemical bond, or noncovalently attached to the marker RNA binding agent and is capable of interacting with a capturing agent. An example of a capturing moiety useful for the methods provided herein is biotin. In embodiments, the capturing moiety is biotin. In embodiments, the capturing moiety is a cleavable capturing moiety. In embodiments, the capturing moiety is photocleavable biotin.

[0145] A “capturing agent” as provided herein refers to an agent capable of binding a capturing moiety. The interaction between the capturing moiety and the capturing agent may be a high affinity interaction, wherein the capturing moiety and the capturing agent bind to each other (e.g., biotin, streptavidin). An example of a capturing agent useful for the methods provided herein are streptavidin coated beads. In embodiments, the capturing agent is a streptavidin coated bead. Without limitation any suitable affinity binding pairs known in the art may be used as capturing moiety and capturing agent in the methods provided herein. For example, the capturing moiety may be an antibody and the capturing agent may be an antigen-coated bead. In embodiments, the capturing moiety is biotin and the capturing agent is a streptavidin coated bead.

[0146] The marker protein binding agent may bind non-covalently to the LPA-associated disease marker protein through ionic, van der Waals, electrostatic or hydrogen bonds. Upon binding of the marker protein binding agent to the LPA-associated disease marker protein a disease marker-protein binding agent complex is formed. The methods provided herein including embodiments thereof include detecting the disease marker-protein binding agent complex, thereby determining the expression level of a LPA-associated disease marker protein or fragment thereof in a biological sample. Thus, in embodiments, the determining includes (a) contacting an LPA-associated disease marker protein with a marker protein binding agent in the biological sample, thereby forming a disease marker protein-binding agent complex; and (b) detecting the disease marker protein-binding agent complex. The disease marker protein-binding agent complex may be separated from the sample and unbound components contained therein by contacting the disease marker protein-binding agent complex with a capturing agent as described above (e.g., streptavidin-coated beads). Thus, in embodiments, the detecting includes contacting the disease marker protein-binding agent complex with a capturing agent, thereby forming a captured disease marker protein-binding agent complex. The captured disease marker protein-binding agent complex may be washed to remove any unbound components.

[0147] The marker RNA binding agent may bind non-covalently to the LPA-associated disease marker RNA through ionic, van der Waals, electrostatic or hydrogen bonds. Upon binding of the marker RNA binding agent to the LPA-associated disease marker RNA a disease marker-RNA binding agent complex is formed. The methods provided herein including embodiments thereof include detecting the disease marker-RNA binding agent complex, thereby determining the expression level of an LPA-associated disease marker RNA or fragment thereof in a biological sample. Thus, in embodiments, the determining includes (a) contacting an LPA-associated disease marker RNA with a marker RNA binding agent in the biological sample, thereby forming a disease marker RNA-binding agent complex; and (b) detecting the disease marker RNA-binding agent complex. The disease marker RNA-binding agent complex may be separated from the sample and unbound components contained therein by contacting the disease marker RNA-binding agent complex with a capturing agent as described above (e.g., streptavidin-coated beads). Thus, in embodiments, the detecting includes contacting the disease marker RNA-binding agent complex with a capturing agent, thereby forming a captured disease marker RNA-binding agent complex. The captured disease marker RNA-binding agent complex may be washed to remove any unbound components.

[0148] For the methods provided herein, the LPA-associated disease marker protein or fragment thereof or an LPA-associated disease marker RNA may be contacted with a tagging moiety. A “tagging moiety” as provided herein is a composition capable of non-covalently binding to the LPA-associated disease marker protein or RNA or fragment thereof. In embodiments, the tagging moiety is biotin. Upon binding to the LPA-associated disease marker protein or RNA or fragment thereof, the tagging moiety may bind through high affinity interaction with a tagging agent (e.g., streptavidin). In embodiments, the LPA-associated disease marker protein or RNA or fragment thereof is contacted with a tagging moiety after the formation of a captured disease marker protein-binding agent complex. In embodiments, the LPA-associated disease marker protein or fragment thereof is contacted with a tagging moiety before the formation of a captured disease marker protein-binding agent complex. In embodiments, the LPA-associated disease marker protein or fragment thereof is contacted with a tagging moiety at the same time as the formation of a captured disease marker protein-binding agent complex. In embodiments, the detecting further includes (1) contacting the captured disease marker protein-binding agent complex with a tagging moiety; thereby forming a tagged disease marker protein-binding agent complex; and (2) separating the tagged disease marker protein-binding agent complex from the biological sample.

[0149] Once the tagged disease marker protein-binding agent complex is separated from the biological sample, the interaction between capturing moiety (e.g., photocleavable biotin) and capturing agent (e.g., streptavidin-coated beads) is reversed (e.g. through cleavage of the photocleavable biotin) and a cleaved disease marker protein-binding agent complex is formed. The cleaved disease marker protein-binding agent complex includes a LPA-associated disease marker protein or fragment thereof bound to a marker protein binding agent and a tagging moiety. Thus, in embodiments, the detecting further includes after the separating of step (2) separating the capturing binding agent from the tagged disease marker protein-binding agent complex, thereby forming a cleaved disease marker protein-binding agent complex.

[0150] The cleaved disease marker protein-binding agent complex may be contacted with a tagging agent (e.g., streptavidin-coated beads) and the tagging moiety (e.g., biotin) bound to the LPA-associated disease marker protein or fragment thereof may form a high affinity interaction with the tagging agent. The cleaved disease marker protein-binding agent complex may be captured by a tagging agent (e.g., streptavidin-coated beads) and the marker protein binding agent may be subsequently separated, (e.g., eluted by affinity chromatography) from the cleaved disease marker protein-binding agent complex. Once the marker protein binding agent (e.g., aptamer) is released (separated) from the cleaved disease marker protein-binding agent complex it may be quantified using standard techniques know in the art to quantify labeled nucleic acids molecules (e.g., hybridization to a custom DNA microarray). Thus, in embodiments, the detecting further includes (3) separating the marker protein binding agent from the cleaved disease marker protein-binding agent complex; thereby forming a released marker protein binding agent; and (4) determining an amount of released marker protein binding agent.

### VI. Marker Proteins and RNAs

[0151] The LPA-associated disease marker proteins and LPA-associated disease marker RNAs as provided herein (e.g., set forth in Table 1, 2, 3, 4 or 5) are applicable to all methods, kits and compositions described herein. For the methods, kits and compositions described herein the expression level of one or more LPA-associated disease marker proteins or LPA-associated disease marker RNAs may be determined (detected). In embodiments, the expression level of at least one LPA-associated disease marker protein or LPA-associated disease marker RNA is determined (detected). In embodiments, the expression level of a plurality (e.g., 2, 3, 4, 5, 6, 7, 8, 9, 10, 11, 12, 13, 14, 15, 16, 17, 18, 19, or 20) of LPA-associated disease marker proteins or LPA-associated disease marker RNAs is determined (detected). Where the expression level of an LPA-associated disease marker protein or an LPA-associated disease marker RNA is determined (detected), the expression level of a combination of any one of the LPA-associated disease marker proteins or LPA-associated disease marker RNAs provided herein is determined (detected).

[0152] For the methods, kits and compositions described herein the expression level of one or more LPA-associated disease marker proteins and one or more LPA-associated disease marker RNAs may be determined (detected). In embodiments, the expression level of at least one LPA-associated disease marker protein and at least one LPA-associated disease marker RNA is determined (detected). In embodiments, the expression level of a plurality (e.g., 2, 3, 4, 5, 6, 7, 8, 9, 10, 11, 12, 13, 14, 15, 16, 17, 18, 19, or 20) of LPA-associated disease marker proteins and a plurality (e.g., 2, 3, 4, 5, 6, 7, 8, 9, 10, 11, 12, 13, 14, 15, 16, 17, 18, 19, or 20) of LPA-associated disease marker RNAs is determined (detected). For example, the expression level of a combination of LPA-associated disease marker proteins set forth in Table 1 or 2 or of SEQ ID NO:1-202 may be determined (detected) in combination with one or more LPA-associated disease marker RNAs set forth in Table 3 or 4 or of SEQ ID NO:203-499.

[0153] For example, the expression level of a combination of LPA-associated disease marker proteins set forth in Table 1 or 2 or of SEQ ID NO:1-202 may be determined (detected) in the methods, kits or compositions provided herein. In embodiments, the LPA-associated disease marker protein is CXCL3/CXCL2, PAI-1, ANGPT1, P41, GREM1, NID2, NET4, NXPH1, THBS1, TIMP-3, BASI, CAPG, CTAP-III, DDR2, IGFBP-2, MMP-1, MMP-9, NAP-2, CCLS or SERPINE2. In embodiments, the LPA-associated disease marker protein is CXCL3/CXCL2. In embodiments, the LPA-associated disease marker protein is PAI-1. In embodiments, the LPA-associated disease marker protein is ANGPT1. In embodiments, the LPA-associated disease marker protein is P41. In embodiments, the LPA-associated disease marker protein is GREM1. In embodiments, the LPA-associated disease marker protein is NID2. In embodiments, the LPA-associated disease marker protein is NET4. In embodiments, NXPH1. In embodiments, the LPA-associated disease marker protein is THBS1. In embodiments, the LPA-associated disease marker protein is TIMP-3. In embodiments, the LPA-associated disease marker protein is BASI. In embodiments, the LPA-associated disease marker protein is CAPG. In embodiments, the LPA-associated disease marker protein is CTAP-III. In embodiments, the LPA-associated disease marker protein is DDR2. In embodiments, the LPA-associated disease marker protein is IGFBP-2. In embodiments, the LPA-associated disease marker protein is MMP-1. In embodiments, the LPA-associated disease marker protein is MMP-9. In embodiments, the LPA-associated disease marker protein is NAP-2. In embodiments, the LPA-associated disease marker protein is CCL5. In embodiments, the LPA-associated disease marker protein is SERPINE2.

[0154] In embodiments, the expression level of CXCL3/CXCL2 and one or more LPA-associated disease marker proteins as provided herein (e.g., set forth in Table 1 or 2 or of SEQ ID NO:1-202) is determined (detected). In embodiments, the expression level of PAI-1 and one or more LPA-associated disease marker proteins as provided herein (e.g., set forth in Table 1 or 2 or of SEQ ID NO:1-202) is determined (detected). In embodiments, the expression level of ANGPT1 and one or more LPA-associated disease marker proteins as provided herein (e.g., set forth in Table 1 or 2 or of SEQ ID NO:1-202) is determined (detected). In embodiments, the expression level of P41 and one or more LPA-associated disease marker proteins as provided herein (e.g., set forth in Table 1 or 2 or of SEQ ID NO:1-202) is determined (detected). In embodiments, the expression level of GREM1 and one or more LPA-associated disease marker proteins as provided herein (e.g., set forth in Table 1 or 2 or of SEQ ID NO:1-202) is determined (detected). In embodiments, the expression level of NID2 and one or more LPA-associated disease marker proteins as provided herein (e.g., set forth in Table 1 or 2 or of SEQ ID NO:1-202) is determined (detected). In embodiments, the expression level of NET4 and one or more LPA-associated disease marker proteins as provided herein (e.g., set forth in Table 1 or 2 or of SEQ ID NO:1-202) is determined (detected). In embodiments, the expression level of NXPH1 and one or more LPA-associated disease marker proteins as provided herein (e.g., set forth in Table 1 or 2 or of SEQ ID NO:1-202) is determined (detected).

[0155] In embodiments, the expression level of THBS1 and one or more LPA-associated disease marker proteins as provided herein (e.g., set forth in Table 1 or 2 or of SEQ ID NO:1-202) is determined (detected). In embodiments, the expression level of TIMP-3 and one or more LPA-associated disease marker proteins as provided herein (e.g., set forth in Table 1 or 2 or of SEQ ID NO:1-202) is determined (detected). In embodiments, the expression level of BASI and one or more LPA-associated disease marker proteins as provided herein (e.g., set forth in Table 1 or 2 or of SEQ ID NO:1-202) is determined (detected). In embodiments, the expression level of CAPG and one or more LPA-associated disease marker proteins as provided herein (e.g., set forth in Table 1 or 2 or of SEQ ID NO:1-202) is determined (detected). In embodiments, the expression level of CTAP-III and one or more LPA-associated disease marker proteins as provided herein (e.g., set forth in Table 1 or 2 or of SEQ ID NO:1-202) is determined (detected). In embodiments, the expression level of DDR2 and one or more LPA-associated disease marker proteins as provided herein (e.g., set forth in Table 1 or 2 or of SEQ ID NO:1-202) is determined (detected).

[0156] In embodiments, the expression level of IGFBP-2 and one or more LPA-associated disease marker proteins as provided herein (e.g., set forth in Table 1 or 2 or of SEQ ID NO:1-202) is determined (detected). In embodiments, the expression level of MMP-1 and one or more LPA-associated disease marker proteins as provided herein (e.g., set forth in Table 1 or 2 or of SEQ ID NO:1-202) is determined (detected). In embodiments, the expression level of MMP-9 and one or more LPA-associated disease marker proteins as provided herein (e.g., set forth in Table 1 or 2 or of SEQ ID NO:1-202) is determined (detected). In embodiments, the expression level of NAP-2 and one or more LPA-associated disease marker proteins as provided herein (e.g., set forth in Table 1 or 2 or of SEQ ID NO:1-202) is determined (detected). In embodiments, the expression level of CCL5 and one or more LPA-associated disease marker proteins as provided herein (e.g., set forth in Table 1 or 2 or of SEQ ID NO:1-202) is determined (detected). In embodiments, the expression level of SERPINE2 and one or more LPA-associated disease marker proteins as provided herein (e.g., set forth in Table 1 or 2 or of SEQ ID NO:1-202) is determined (detected).

[0157] For example, the expression level of a combination of LPA-associated disease marker RNAs set forth in Table 3 or 4 or of SEQ ID NO:203-499 may be determined (detected) in the methods, kits or compositions provided herein. In embodiments, the LPA-associated disease marker RNA is CYR61, KRTAP1-5, DKK1, MCP-1/CCL-2, HBEGF, CTGF, KPRP, IL6TNFAIP3, KRTAP4-12, BIRC3, MIR218-1, VGLL3, IER3, GPR37, DUSP1, EFNB2, HAS2, PDCD1LG2, SERPINB2, UGCG, CHIC2, PTX3, CNST or TXNIP. In embodiments, the LPA-associated disease marker RNA is CYR61. In embodiments, the LPA-associated disease marker RNA is KRTAP1-5. In embodiments, the LPA-associated disease marker RNA is DKK1. In embodiments, the LPA-associated disease marker RNA is MCP-1/CCL-2. In embodiments, the LPA-associated disease marker RNA is HBEGF. In embodiments, the LPA-associated disease marker RNA is CTGF. In embodiments, the LPA-associated disease marker RNA is KPRP. In embodiments, the LPA-associated disease marker RNA is IL6TNFAIP3. In embodiments, the LPA-associated disease marker RNA is KRTAP4-12. In embodiments, the LPA-associated disease marker RNA is BIRC3. In embodiments, the LPA-associated disease marker RNA is MIR218-1.

[0158] In embodiments, the LPA-associated disease marker RNA is VGLL3. In embodiments, the LPA-associated disease marker RNA is IER3. In embodiments, the LPA-associated disease marker RNA is GPR37. In embodiments, the LPA-associated disease marker RNA is DUSP1. In embodiments, the LPA-associated disease marker RNA is EFNB2. In embodiments, the LPA-associated disease marker RNA is HAS2. In embodiments, the LPA-associated disease marker RNA is PDCD1LG2. In embodiments, the LPA-associated disease marker RNA is SERPINB2. In embodiments, the LPA-associated disease marker RNA is UGCG. In embodiments, the LPA-associated disease marker RNA is CHIC2. In embodiments, the LPA-associated disease marker RNA is PTX3. In embodiments, the LPA-associated disease marker RNA is CNST. In embodiments, the LPA-associated disease marker RNA is TXNIP.

[0159] In embodiments, the expression level of CYR61 and one or more LPA-associated disease marker RNAs as provided herein (e.g., set forth in Table 3 or 4 or of SEQ ID NO:203-499) is determined (detected). In embodiments, the expression level of KRTAP1-5 and one or more LPA-associated disease marker RNAs as provided herein (e.g., set forth in Table 3 or 4 or of SEQ ID NO:203-499) is determined (detected). In embodiments, the expression level of DKK1 and one or more LPA-associated disease marker RNAs as provided herein (e.g., set forth in Table 3 or 4 or of SEQ ID NO:203-499) is determined (detected). In embodiments, the expression level of MCP-1/CCL-2 and one or more LPA-associated disease marker RNAs as provided herein (e.g., set forth in Table 3 or 4 or of SEQ ID NO:203-499) is determined (detected).

[0160] In embodiments, the expression level of HBEGF and one or more LPA-associated disease marker RNAs as provided herein (e.g., set forth in Table 3 or 4 or of SEQ ID NO:203-499) is determined (detected). In embodiments, the expression level of CTGF and one or more LPA-associated disease marker RNAs as provided herein (e.g., set forth in Table 3 or 4 or of SEQ ID NO:203-499) is determined (detected). In embodiments, the expression level of KPRP and one or more LPA-associated disease marker RNAs as provided herein (e.g., set forth in Table 3 or 4 or of SEQ ID NO:203-499) is determined (detected). In embodiments, the expression level of IL6TNFAIP3 and one or more LPA-associated disease marker RNAs as provided herein (e.g., set forth in Table 3 or 4 or of SEQ ID NO:203-499) is determined (detected). In embodiments, the expression level of KRTAP4-12 and one or more LPA-associated disease marker RNAs as provided herein (e.g., set forth in Table 3 or 4 or of SEQ ID NO:203-499) is determined (detected). In embodiments, the expression level of BIRC3 and one or more LPA-associated disease marker RNAs as provided herein (e.g., set forth in Table 3 or 4 or of SEQ ID NO:203-499) is determined (detected). In embodiments, the expression level of MIR218-1 and one or more LPA-associated disease marker RNAs as provided herein (e.g., set forth in Table 3 or 4 or of SEQ ID NO:203-499) is determined (detected).

[0161] In embodiments, the expression level of VGLL3 and one or more LPA-associated disease marker RNAs as provided herein (e.g., set forth in Table 3 or 4 or of SEQ ID NO:203-499) is determined (detected). In embodiments, the expression level of IER3 and one or more LPA-associated disease marker RNAs as provided herein (e.g., set forth in Table 3 or 4 or of SEQ ID NO:203-499) is determined (detected). In embodiments, the expression level of GPR37 and one or more LPA-associated disease marker RNAs as provided herein (e.g., set forth in Table 3 or 4 or of SEQ ID NO:203-499) is determined (detected). In embodiments, the expression level of DUSP1 and one or more LPA-associated disease marker RNAs as provided herein (e.g., set forth in Table 3 or 4 or of SEQ ID NO:203-499) is determined (detected). In embodiments, the expression level of EFNB2 and one or more LPA-associated disease marker RNAs as provided herein (e.g., set forth in Table 3 or 4 or of SEQ ID NO:203-499) is determined (detected). In embodiments, the expression level of HAS2 and one or more LPA-associated disease marker RNAs as provided herein (e.g., set forth in Table 3 or 4 or of SEQ ID NO:203-499) is determined (detected). In embodiments, the expression level of PDCD1LG2 and one or more LPA-associated disease marker RNAs as provided herein (e.g., set forth in Table 3 or 4 or of SEQ ID NO:203-499) is determined (detected). In embodiments, the expression level of SERPINB2 and one or more LPA-associated disease marker RNAs as provided herein (e.g., set forth in Table 3 or 4 or of SEQ ID NO:203-499) is determined (detected).

[0162] In embodiments, the expression level of UGCG and one or more LPA-associated disease marker RNAs as provided herein (e.g., set forth in Table 3 or 4 or of SEQ ID NO:203-499) is determined (detected). In embodiments, the expression level of CHIC2 and one or more LPA-associated disease marker RNAs as provided herein (e.g., set forth in Table 3 or 4 or of SEQ ID NO:203-499) is determined (detected). In embodiments, the expression level of PTX3 and one or more LPA-associated disease marker RNAs as provided herein (e.g., set forth in Table 3 or 4 or of SEQ ID NO:203-499) is determined (detected). In embodiments, the expression level of CNST F and one or more LPA-associated disease marker RNAs as provided herein (e.g., set forth in Table 3 or 4 or of SEQ ID NO:203-499) is determined (detected). In embodiments, the expression level of TXNIP and one or more LPA-associated disease marker RNAs as provided herein (e.g., set forth in Table 3 or 4 or of SEQ ID NO:203-499) is determined (detected).

### VII. Specific Embodiments

[0163] LPA Receptor Expression in Cells

[0164] Expression of LPA receptors 1-6 was assayed by qRT-PCR in primary human fibroblasts, endothelial cells, epithelial cells, and pericytes. LPA1 is the most abundantly expressed isoform in fibroblasts, epithelial cells, and pericytes. LPA6 is the dominant isoform in endothelial cells and is present in all cell types tested and LPA2, LPA6 are predominant in circulating cells (FIG. 1).

[0165] Experimental Design for Gene Expression and Secreted Protein Analysis

[0166] Changes in gene expression after 3 hours of LPA induction were profiled on Affymetrix Human Gene ST 2.0 microarrays; differentially expressed genes identified by ANOVA with FDR <0.05 and fold-change >1.2. Process networks associated with differentially expressed genes were defined using MetaCore. Changes in secreted protein expression after 24 hours of LPA induction were profiled on an aptamer-based proteomic platform (1129 proteins); differentially expressed proteins identified by t-test.

[0167] Gene Expression after LPA Induction

[0168] FIG. 4 shows a comparison of 1 μM LPA induction in fibroblasts and epithelial cells. LPA induced significant changes in gene expression in fibroblasts and epithelial cells as shown in Tables 3 and 4. Changes were broadly inhibited by addition of a selective LPA1 receptor antagonist. LPA-induced both common and cell-specific gene expression changes in fibroblasts and epithelial cells as shown in Tables 3 and 4. LPA-induced pathways include without limitation, cytoskeletal remodeling and immune response in fibroblasts and epithelial cells, cell adhesion in fibroblasts, and epithelial-mesenchymal transition in epithelial cells. LPA induced changes in secreted protein expression in fibroblasts and epithelial cells are shown in Tables 1, 2, and 5. Changes could be inhibited by an LPA1 receptor antagonist. Several LPA-induced proteins were observed as differentially expressed in plasma of IPF patients compared to controls (Table 5).

[0169] LPA1 is significantly expressed in cells relevant to fibrosis, including fibroblasts, epithelial cells, and pericytes. LPA6 is predominant in endothelial cells, but is present in all cell types tested. Unbiased characterization of gene and secreted protein expression identified common, as well as cell-specific, effects. LPA-induced genes and proteins were associated with pathways implicated in fibrosis. Several have also been independently associated with IPF. Treatment with a selective LPA1 receptor antagonist inhibited LPA-dependent changes.

[0170] Treatment of Cells with LPA, DNA Isolation and mRNA Expression Analysis of Marker RNAs Shown in Table 3 and 4:

[0171] Total RNA was isolated from normal human lung fibroblasts, human bronchial epithelial cells, and human pulmonary alveolar epithelial cells treated for 4 hours with LPA and/or LPAR1 inhibitor. Each treatment condition was assayed in triplicate. Samples were profiled on Affymetrix Human Gene ST Arrays 1.0 and/or 2.0 after preparation using the Ambion WT Expression Kit according to manufacturers' instructions.

[0172] mRNA Expression Data Analysis of Marker RNAs Shown in Table 3 and 4

[0173] Data normalization and all subsequent analyses were performed in Partek Genomics Suite (Partek, St. Louis, Mo.). Data were normalized using the Robust Multi-array Average (RMA) algorithm. Differentially expressed genes were identified by ANOVA with correction for multiple comparisons with p-value with FDR<0.05. A fold-change cut-off was not strictly applied, although the majority of the differentially expressed genes identified have fold-changes greater than 1.2. Genes were included if they were statistically significant for (1) LPA-induction and (2) response to treatment with an LPAR1 inhibitor.

[0174] Protein Analysis

[0175] Treatment of cells with LPA, isolation supernatant, analysis of secreted protein expression using soma panel was performed as follows: Supernatant was collected from in vitro cultures of normal human lung fibroblasts, human bronchial epithelial cells, and human pulmonary alveolar epithelial cells treated for 24 hours with LPA and/or LPAR1 inhibitor. Each treatment condition was assayed in triplicate. 1129 proteins were profiled using a broad aptamer-based proteomic platform (SomaLogic, Colo., US). Briefly, the technology uses DNA aptamers containing chemically modified nucleotides as highly specific protein binding reagents in a multiplexed assay that transforms the quantity of each targeted protein into a corresponding quantify of the aptamer. Protein quantities are then detected on a microarray platform and recorded as Relative Fluorescence Units (RFU).

[0176] In Tables 1-5 The differentially expressed secreted proteins set forth in Tables 1, 2, and 5 and the differentially expressed mRNAs set forth in Table 3 and 4 were identified by visual inspection of individual dot-plots.

[0177] Cell Culture Conditions

[0178] For the gene and protein expression analysis primary fibroblasts (NHLF product #CC-2512 from Lonza group LTD) and primary epithelial cells (NHBE Product #CC-2540 from Lonza; HPAEpiC Product #3200 from Sciencell (USA, California)) were cultured as recommended by the manufacturer, except they were cultured on collagen coated plates. As part of the induction protocol cells were starved overnight in low (0.2 or 0.1% serum) or no serum (0%), prior to stimulation with LPA.

### VIII. References

[0179] 1. Shea B S and Tager A M. Pro Am Thorac Soc 2012. 9(3):102-110.
[0180] 2. Swaney J S et al. BJP 2010. 160:1699-1713.
[0181] 3. Montesi S B et al. BMC Pulm Med 2014. 14:5.
[0182] 4. Tokumura A et al. Int J Med Sci 2009. 6(4):168-176.
[0183] 5. Elsheikh E et al. Hepatology 2013. 58(S1):92A-207A.
[0184] 6. Antoniou K M et al. Chest 2006. 130(4):982-988.
[0185] 7. Takizawa H et al. Clin Exp Immunol 1997. 107(1):175-181.
[0186] 8. Needleman B W et al. Arthr Rheumat 1992. 35:67-72.
[0187] 9. Collard H R et al. Am J Physiol Lung Cell Mol Physiol 2010. 299(1):L3-7.
[0188] 10. Suga M et al. Eur Resp J 1999. 14(2):376-382.
[0189] 11. Caporali R et al. Sarcoidosis Vasc Diffuse Lung Dis 2004. 21(2):111-118.
[0190] 12. Yanaba K et al. Ann Rheum Dis 2006. 65(1):124-126.
[0191] 13. Choi E S et al. Am J Respir Crit Care Med 2004. 170(5):508-515.
[0192] 14. Yamashita C M et al. Am J Pathol 2011. 179(4):1733-45.

### IX. Tables

TABLE 1
Secreted Proteins

| SEQ | | | | | | effect of |
|---|---|---|---|---|---|---|
| ID | | | | | effect | LPAR1 |
| NO: | Target | UniProt | EntrezGeneID | EntrezGeneSymbol | of LPA | inhibitor |
| 1 | 41 | P11171 | 2035 | EPB41 | up | down |
| 2 | Activin A | P08476 | 3624 | INHBA | up | down |
| 3 | ADAM 9 | Q13443 | 8754 | ADAM9 | up | down |
| 4 | ADAM12 | O43184 | 8038 | ADAM12 | | down |
| 5 | Aflatoxin B1 | O43488 | 8574 | AKR7A2 | | up |
| | aldehyde | | | | | |
| | reductase | | | | | |
| 6 | ALCAM | Q13740 | 214 | ALCAM | up | down |
| 7 | Aminoacylase-1 | Q03154 | 95 | ACY1 | up | up |
| 8 | Angiogenin | P03950 | 283 | ANG | up | down |
| 9 | Angiopoietin-1 | Q15389 | 284 | ANGPT1 | up | down |
| 10 | Angiopoietin-2 | O15123 | 285 | ANGPT2 | down | up |
| 11 | Angiostatin | P00747 | 5340 | PLG | down | |
| 12 | ANGL4 | Q9BY76 | 51129 | ANGPTL4 | up | |
| 13 | annexin I | P04083 | 301 | ANXA1 | up | |
| 14 | Apo D | P05090 | 347 | APOD | | up |
| 15 | Apo E2 | P02649 | 348 | APOE | down | |
| 16 | Apo E3 | P02649 | 348 | APOE | down | |
| 17 | AREG | P15514 | 374 | AREG | up | |
| 18 | ART | O00253 | 181 | AGRP | | up |
| 19 | ARTS1 | Q9NZ08 | 51752 | ERAP1 | up | down |
| 20 | ASM3A | Q92484 | 10924 | SMPDL3A | up | |
| 21 | ATS1 | Q9UHI8 | 9510 | ADAMTS1 | down | up |
| 22 | B7-H1 | Q9NZQ7 | 29126 | CD274 | up | down |
| 23 | BASI | P35613 | 682 | BSG | up | |
| 24 | BFL1 | Q16548 | 597 | BCL2A1 | up | down |
| 25 | BGH3 | Q15582 | 7045 | TGFBI | up | down |
| 26 | BGN | P21810 | 633 | BGN | up | down |
| 27 | Bone | P07585 | 1634 | DCN | up | down |
| | proteoglycan II | | | | | |
| 28 | BSSP4 | Q9GZN4 | 64063 | PRSS22 | up | down |
| 29 | C1r | P00736 | 715 | C1R | | up |
| 30 | Cadherin-2 | P19022 | 1000 | CDH2 | | up |
| 31 | calgranulin B | P06702 | 6280 | S100A9 | | up |
| 32 | CAPG | P40121 | 822 | CAPG | up | up |
| 33 | Carbonic | P23280 | 765 | CA6 | | up |
| | anhydrase 6 | | | | | |
| 34 | Caspase-3 | P42574 | 836 | CASP3 | up | up |
| 35 | Cathepsin A | P10619 | 5476 | CTSA | up | down |
| 36 | Cathepsin H | P09668 | 1512 | CTSH | up | down |
| 37 | Cathepsin S | P25774 | 1520 | CTSS | up | down |
| 38 | Cathepsin V | O60911 | 1515 | CTSL2 | up | down |
| 39 | CATZ | Q9UBR2 | 1522 | CTSZ | up | down |
| 40 | CK2-A1:B | P68400 | 1457 | CSNK2A1 | up | |
| | | P67870 | 1460 | CSNK2B | | |
| 41 | Coactosin-like | Q14019 | 23406 | COTL1 | | down |
| | protein | | | | | |
| 42 | Coagulation | P00742 | 2159 | F10 | down | up |
| | Factor Xa | | | | | |
| 43 | Cofilin-1 | P23528 | 1072 | CFL1 | up | |
| 44 | COMMD7 | Q86VX2 | 149951 | COMMD7 | up | |
| 45 | CRDL1 | Q9BU40 | 91851 | CHRDL1 | up | down |
| 46 | CRP | P02741 | 1401 | CRP | | down |
| 47 | CTAP-III | P02775 | 5473 | PPBP | up | down |
| 48 | CXCL16 soluble | Q9H2A7 | 58191 | CXCL16 | up | |
| 49 | Cyclophilin A | P62937 | 5478 | PPIA | up | up |
| 50 | Cystatin M | Q15828 | 1474 | CST6 | up | down |
| 51 | DAF | P08174 | 1604 | CD55 | up | down |
| 52 | DBNL | Q9UJU6 | 28988 | DBNL | up | down |
| 53 | DcR3 | O95407 | 8771 | TNFRSF6B | up | down |
| 54 | DC-SIGN | Q9NNX6 | 30835 | CD209 | | down |
| 55 | DERM | Q07507 | 1805 | DPT | down | up |
| 56 | Desmoglein-1 | Q02413 | 1828 | DSG1 | | up |
| 57 | discoidin domain | Q08345 | 780 | DDR1 | up | down |
| | receptor 1 | | | | | |
| 58 | Discoidin domain | Q16832 | 4921 | DDR2 | up | down |
| | receptor 2 | | | | | |
| 59 | DKK1 | O94907 | 22943 | DKK1 | up | down |
| 60 | DKK3 | Q9UBP4 | 27122 | DKK3 | up | down |
| 61 | Dkk-4 | Q9UBT3 | 27121 | DKK4 | up | down |
| 62 | DLRB1 | Q9NP97 | 83658 | DYNLRB1 | | up |
| 63 | DPP2 | Q9UHL4 | 29952 | DPP7 | up | down |
| 64 | eIF-5A-1 | P63241 | 1984 | EIF5A | down | up |
| 65 | Elafin | P19957 | 5266 | PI3 | up | |
| 66 | EMR2 | Q9UHX3 | 30817 | EMR2 | up | down |
| 67 | ENA-78 | P42830 | 6374 | CXCL5 | up | down |
| 68 | Endocan | Q9NQ30 | 11082 | ESM1 | up | down |
| 69 | Endothelin- | P42892 | 1889 | ECE1 | up | down |
| | converting | | | | | |
| | enzyme 1 | | | | | |
| 70 | Eotaxin | P51671 | 6356 | CCL11 | up | down |
| 71 | EPHA3 | P29320 | 2042 | EPHA3 | up | down |
| 72 | EphB4 | P54760 | 2050 | EPHB4 | up | |
| 73 | Ephrin-A5 | P52803 | 1946 | EFNA5 | up | down |
| 74 | Ephrin-B3 | Q15768 | 1949 | EFNB3 | up | down |
| 75 | EPI | O14944 | 2069 | EREG | up | down |
| 76 | Epithelial cell | P29317 | 1969 | EPHA2 | up | down |
| | kinase | | | | | |
| 77 | FCAR | P24071 | 2204 | FCAR | down | |
| 78 | FGF-18 | O76093 | 8817 | FGF18 | down | up |
| 79 | FGF-20 | Q9NP95 | 26281 | FGF20 | up | down |
| 80 | FGF7 | P21781 | 2252 | FGF7 | up | down |
| 81 | Flt-3 | P36888 | 2322 | FLT3 | up | up |
| 82 | FST | P19883 | 10468 | FST | up | down |
| 83 | FSTL3 | O95633 | 10272 | FSTL3 | up | down |
| 84 | Galectin-3 | P17931 | 3958 | LGALS3 | up | up |
| 85 | GAPDH liver | P04406 | 2597 | GAPDH | up | up |
| 86 | GCP-2 | P80162 | 6372 | CXCL6 | up | down |
| 87 | G-CSF | P09919 | 1440 | CSF3 | up | down |
| 88 | GDF-9 | O60383 | 2661 | GDF9 | down | up |
| 89 | gp130 soluble | P40189 | 3572 | IL6ST | up | down |
| 90 | GREM1 | O60565 | 26585 | GREM1 | up | down |
| 91 | GRN | P28799 | 2896 | GRN | up | down |
| 92 | Gro-a | P09341 | 2919 | CXCL1 | up | down |
| 93 | Gro-b/g | P19876 | None | CXCL3 CXCL2 | up | down |
| | | P19875 | | | | |
| 94 | GV | P39877 | 5322 | PLA2G5 | up | down |
| 95 | HAI-1 | O43278 | 6692 | SPINT1 | | up |
| 96 | HGF | P14210 | 3082 | HGF | up | down |
| 97 | Histone H2A.z | P0C0S5 | 3015 | H2AFZ | | down |
| 98 | hnRNP A/B | Q99729 | 3182 | HNRNPAB | | up |
| 99 | HNRPQ | O60506 | 10492 | SYNCRIP | | up |
| 100 | ICOS | Q9Y6W8 | 29851 | ICOS | | down |
| 101 | IDE | P14735 | 3416 | IDE | up | |
| 102 | IGFBP-2 | P18065 | 3485 | IGFBP2 | down | up |
| 103 | IGFBP-3 | P17936 | 3486 | IGFBP3 | up | down |
| 104 | IGFBP-7 | Q16270 | 3490 | IGFBP7 | up | down |
| 105 | IGF-I sR | P08069 | 3480 | IGF1R | up | down |
| 106 | IGF-II receptor | P11717 | 3482 | IGF2R | up | down |
| 107 | IL-1 R4 | Q01638 | 9173 | IL1RL1 | up | down |
| 108 | IL-11 | P20809 | 3589 | IL11 | up | down |
| 109 | IL-12 RB2 | Q99665 | 3595 | IL12RB2 | up | down |
| 110 | IL-16 | Q14005 | 3603 | IL16 | | up |
| 111 | IL-17D | Q8TAD2 | 53342 | IL17D | up | down |
| 112 | IL-6 | P05231 | 3569 | IL6 | up | down |
| 113 | IL-6 sRa | P08887 | 3570 | IL6R | up | down |
| 114 | IL-8 | P10145 | 3576 | IL8 | up | down |
| 115 | IP-10 | P02778 | 3627 | CXCL10 | up | down |
| 116 | JAG1 | P78504 | 182 | JAG1 | up | down |
| 117 | JAG2 | Q9Y219 | 3714 | JAG2 | up | down |
| 118 | KPCI | P41743 | 5584 | PRKCI | up | |
| 119 | Layilin | Q6UX15 | 143903 | LAYN | up | down |
| 120 | LG3BP | Q08380 | 3959 | LGALS3BP | up | down |
| 121 | LGMN | Q99538 | 5641 | LGMN | up | down |
| 122 | LRIG3 | Q6UXM1 | 121227 | LRIG3 | up | down |
| 123 | MATN2 | O00339 | 4147 | MATN2 | | down |
| 124 | MCP-1 | P13500 | 6347 | CCL2 | up | down |
| 125 | MCP-3 | P80098 | 6354 | CCL7 | up | down |
| 126 | Met | P08581 | 4233 | MET | up | down |
| 127 | MICA | Q29983 | 4276 | MICA | up | down |
| 128 | MICB | Q29980 | 4277 | MICB | up | down |
| 129 | Midkine | P21741 | 4192 | MDK | up | |
| 130 | MIP-3a | P78556 | 6364 | CCL20 | up | down |
| 131 | MMP-1 | P03956 | 4312 | MMP1 | up | down |
| 132 | MMP-10 | P09238 | 4319 | MMP10 | up | down |
| 133 | MMP-12 | P39900 | 4321 | MMP12 | up | down |
| 134 | MMP-13 | P45452 | 4322 | MMP13 | up | down |
| 135 | MMP-3 | P08254 | 4314 | MMP3 | up | down |
| 136 | MMP-9 | P14780 | 4318 | MMP9 | up | down |
| 137 | MRC2 | Q9UBG0 | 9902 | MRC2 | up | down |
| 138 | NAGK | Q9UJ70 | 55577 | NAGK | up | |
| 139 | NAP-2 | P02775 | 5473 | PPBP | up | down |
| 140 | NCAM-L1 | P32004 | 3897 | L1CAM | up | down |
| 141 | NET4 | Q9HB63 | 59277 | NTN4 | up | down |
| 142 | Neurotrophin-3 | P20783 | 4908 | NTF3 | up | down |
| 143 | NID2 | Q14112 | 22795 | NID2 | up | down |
| 144 | NKp46 | O76036 | 9437 | NCR1 | up | down |
| 145 | Nogo Receptor | Q9BZR6 | 65078 | RTN4R | up | down |
| 146 | NovH | P48745 | 4856 | NOV | up | down |
| 147 | NRP1 | O14786 | 8829 | NRP1 | up | down |
| 148 | NRX3B | Q9HDB5 | 9369 | NRXN3 | up | down |
| 149 | NXPH1 | P58417 | 30010 | NXPH1 | up | down |
| 150 | OMD | Q99983 | 4958 | OMD | up | down |
| 151 | ON | P09486 | 6678 | SPARC | up | down |
| 152 | PAI-1 | P05121 | 5054 | SERPINE1 | up | down |
| 153 | PARK7 | Q99497 | 11315 | PARK7 | up | down |
| 154 | PCSK7 | Q16549 | 9159 | PCSK7 | up | down |
| 155 | PDE11 | Q9HCR9 | 50940 | PDE11A | | down |
| 156 | PDGF-AA | P04085 | 5154 | PDGFA | up | down |
| 157 | PDGF-BB | P01127 | 5155 | PDGFB | up | |
| 158 | PGP9.5 | P09936 | 7345 | UCHL1 | | down |
| 159 | PHI | P06744 | 2821 | GPI | | up |
| 160 | Protease nexin I | P07093 | 5270 | SERPINE2 | up | down |
| 161 | PSD7 | P51665 | 5713 | PSMD7 | | down |
| 162 | PTHrP | P12272 | 5744 | PTHLH | up | down |
| 163 | RAC1 | P63000 | 5879 | RAC1 | up | down |
| 164 | RANTES | P13501 | 6352 | CCL5 | up | down |
| 165 | RAP | P30533 | 4043 | LRPAP1 | up | |
| 166 | RGMB | Q6NW40 | 285704 | RGMB | up | down |
| 167 | ROBO2 | Q9HCK4 | 6092 | ROBO2 | up | down |
| 168 | ROR1 | Q01973 | 4919 | ROR1 | | down |
| 169 | SARP-2 | Q8N474 | 6422 | SFRP1 | up | down |
| 170 | SCGF-alpha | Q9Y240 | 6320 | CLEC11A | up | down |
| 171 | SDF-1 | P48061 | 6387 | CXCL12 | up | down |
| 172 | Semaphorin 3A | Q14563 | 10371 | SEMA3A | up | down |
| 173 | sFRP-3 | Q92765 | 2487 | FRZB | down | up |
| 174 | SLIK5 | O94991 | 26050 | SLITRK5 | up | down |
| 175 | Sphingosine | Q9NYA1 | 8877 | SPHK1 | up | up |
| | kinase 1 | | | | | |
| 176 | Spondin-1 | Q9HCB6 | 10418 | SPON1 | down | up |
| 177 | SSRP1 | Q08945 | 6749 | SSRP1 | | up |
| 178 | ST4S6 | Q7LFX5 | 51363 | CHST15 | up | down |
| 179 | suPAR | Q03405 | 5329 | PLAUR | up | down |
| 180 | TAJ | Q9NS68 | 55504 | TNFRSF19 | up | down |
| 181 | TFPI | P10646 | 7035 | TFPI | up | down |
| 182 | TGF-b R III | Q03167 | 7049 | TGFBR3 | up | down |
| 183 | Thrombospondin- | P07996 | 7057 | THBS1 | up | down |
| | 1 | | | | | |
| 184 | TIG2 | Q99969 | 5919 | RARRES2 | up | down |
| 185 | TIMP-3 | P35625 | 7078 | TIMP3 | up | down |
| 186 | TNF sR-I | P19438 | 7132 | TNFRSF1A | up | down |
| 187 | TNF sR-II | P20333 | 7133 | TNFRSF1B | up | down |
| 188 | TNFSF15 | O95150 | 9966 | TNFSF15 | up | down |
| 189 | TrATPase | P13686 | 54 | ACP5 | down | up |
| 190 | TRY3 | P35030 | 5646 | PRSS3 | | up |
| 191 | TSG-6 | P98066 | 7130 | TNFAIP6 | up | down |
| 192 | TSLP | Q969D9 | 85480 | TSLP | up | down |
| 193 | TSP2 | P35442 | 7058 | THBS2 | up | down |
| 194 | TWEAK | O43508 | 8742 | TNFSF12 | down | up |
| 195 | TXD12 | O95881 | 51060 | TXNDC12 | up | down |
| 196 | UNC5H3 | O95185 | 8633 | UNC5C | up | down |
| 197 | uPA | P00749 | 5328 | PLAU | up | down |
| 198 | URB | Q76M96 | 151887 | CCDC80 | up | down |
| 199 | VEGF | P15692 | 7422 | VEGFA | up | down |
| 200 | VEGF121 | P15692 | 7422 | VEGFA | up | down |
| 201 | VEGF-C | P49767 | 7424 | VEGFC | up | down |
| 202 | WKFN1 | Q96D09 | 114928 | GPRASP2 | down | up |

TABLE 2
Secreted Proteins
Secreted protein overlap with plasma proteins
differentially expressed in IPF patients

| | | | IPF vs. |
|---|---|---|---|
| | | | control |
| SEQ | | | (fold- |
| ID NO: | Protein | | change) |
| 93 | CXCL3 | Gro-b/g | 1.62 |
| | CXCL2 | | |
| 152 | PAI-1 | Serpine peptidase inhibitor, clade E | 1.53 |
| 9 | ANGPT1 | Angiopoietin-1 | 1.36 |
| 118 | P41 | P41 | 1.53 |
| 90 | GREM1 | Gremlin 1 | 1.57 |
| 143 | NID2 | Nidogen 2 (osteonidogen) | 1.45 |
| 141 | NET4 | Transmembrane protein 53 | 1.28 |
| 149 | NXPH1 | Neuroexophilin 1 | 1.41 |
| 183 | THBS1 | Thrombospondin-1 | 1.47 |
| 185 | TIMP-3 | TIMP metallopeptidase inhibitor 3 | 1.43 |
| 23 | BASI | Extracellular matrix metalloproteinase | 1.76 |
| 32 | CAPG | Macrophage-capping protein | 1.90 |
| 47 | CTAP-III | Pro-platelet basic protein | 1.43 |
| 58 | DDR2 | Discoidin domain receptor tyrosine | 1.25 |
| | | kinase 2 | |
| 102 | IGFBP-2 | Insulin-like growth factor-binding | −1.27 |
| | | protein 2 | |
| 131 | MMP-1 | Matrix metallopeptidase 1 | 1.51 |
| 136 | MMP-9 | Matrix metallopeptidase 9 | 1.49 |
| 139 | NAP-2 | Napsin B aspartic peptidase | 1.53 |
| 164 | CCL5 | RANTES | 1.55 |
| 160 | SERPINE2 | protease nexin I | 1.99 |

TABLE 3
Gene expression from fibroblasts and/or epithelial cells

| | | | | effect of |
|---|---|---|---|---|
| SEQ | | | effect of | LPAR1 |
| ID NO: | Gene Symbol | RefSeq | LPA | inhibitor |
| 203 | ABL2 | NM_007314 | up | down |
| 204 | AKAP12 | NM_005100 | up | down |
| 205 | AMOTL2 | NM_016201 | up | down |
| 206 | ARRDC3 | NM_020801 | down | up |
| 207 | ARRDC4 | NM_183376 | down | up |
| 208 | BAZ1A | NM_013448 | up | down |
| 209 | BIRC3 | NM_001165 | up | down |
| 210 | C3orf52 | NM_024616 | up | down |
| 211 | C7orf49 | NR_024185 | down | up |
| 212 | CDK6 | NM_001259 | up | down |
| 213 | CDR2 | NM_001802 | up | down |
| 214 | CHIC2 | NM_012110 | up | down |
| 215 | CRIM1 | NM_016441 | up | down |
| 216 | CTGF | NM_001901 | up | down |
| 217 | CYR61 | NM_001554 | up | down |
| 218 | DKK1 | NM_012242 | up | down |
| 219 | DUSP1 | NM_004417 | up | down |
| 220 | DUSP14 | NM_007026 | up | down |
| 221 | DUSP5 | NM_004419 | up | down |
| 222 | EFNB2 | NM_004093 | up | down |
| 223 | ELL2 | NM_012081 | up | down |
| 224 | ENC1 | NM_003633 | up | down |
| 225 | EPHA2 | NM_004431 | up | down |
| 226 | ERRFI1 | NM_018948 | up | down |
| 227 | ETS1 | NM_001143820 | up | down |
| 228 | FAM86B1 | NR_003494 | down | up |
| 229 | FERMT2 | NM_006832 | up | down |
| 230 | FGF5 | NM_004464 | up | down |
| 231 | FOSB | NM_006732 | up | down |
| 232 | FOSL1 | NM_005438 | up | down |
| 233 | FST | NM_006350 | up | down |
| 234 | GADD45B | NM_015675 | up | down |
| 235 | GPCPD1 | NM_019593 | down | up |
| 236 | HAS2 | NM_005328 | up | down |
| 237 | HBEGF | NM_001945 | up | down |
| 238 | HIVEP2 | NM_006734 | up | down |
| 239 | ICAM1 | NM_000201 | up | down |
| 240 | INHBA | NM_002192 | up | down |
| 241 | JMY | NM_152405 | down | up |
| 242 | KPRP | NM_001025231 | up | down |
| 243 | KRTAP1-5 | NM_031957 | up | down |
| 244 | LIF | NM_002309 | up | down |
| 245 | LMO7 | NM_005358 | up | down |
| 246 | MAP2K3 | NM_145109 | up | down |
| 247 | MPV17L2 | NM_032683 | down | up |
| 248 | MYADM | NM_001020818 | up | down |
| 249 | NAV3 | NM_014903 | up | down |
| 250 | NFKB2 | NM_002502 | up | down |
| 251 | NFKBIZ | NM_031419 | up | down |
| 252 | PLAUR | NM_002659 | up | down |
| 253 | PRDM1 | NM_001198 | up | down |
| 254 | RAPH1 | NM_213589 | up | down |
| 255 | RASA2 | NM_006506 | up | down |
| 256 | SEMA7A | NM_003612 | up | down |
| 257 | SERPINB9 | NM_004155 | up | down |
| 258 | SERPINE1 | NM_000602 | up | down |
| 259 | SGK1 | NM_001143676 | up | down |
| 260 | SH3RF1 | NM_020870 | up | down |
| 261 | SLC38A2 | NM_018976 | up | down |
| 262 | SMURF2 | NM_022739 | up | down |
| 263 | SPOCD1 | NM_144569 | up | down |
| 264 | TAGLN3 | NM_013259 | up | down |
| 265 | THBS1 | NM_003246 | up | down |
| 266 | TMEM2 | NM_013390 | up | down |
| 267 | TNFAIP3 | NM_006290 | up | down |
| 268 | TSC22D2 | NM_014779 | up | down |
| 269 | TXNIP | NM_006472 | down | up |
| 270 | UGCG | NM_003358 | up | down |
| 271 | VGLL3 | NM_016206 | up | down |
| 272 | ACPP | NM_001099 | up | down |
| 273 | ADAMTS1 | NM_006988 | up | down |
| 274 | ADAMTS6 | NM_197941 | up | down |
| 275 | AHCTF1 | NM_015446 | up | down |
| 276 | AMACR | NM_014324 | down | up |
| 277 | ANKRD13A | NM_033121 | up | down |
| 278 | APBB3 | NM_133174 | down | up |
| 279 | ARHGAP31 | NM_020754 | up | down |
| 280 | ARHGEF9 | NM_015185 | down | up |
| 281 | ARID3B | NM_006465 | up | down |
| 282 | ARL4D | NM_001661 | down | up |
| 283 | ARL5B | NM_178815 | up | down |
| 284 | ARSJ | NM_024590 | up | down |
| 285 | ASAP1 | NM_018482 | up | down |
| 286 | ASB13 | NM_024701 | down | up |
| 287 | ATP8B1 | NM_005603 | up | down |
| 288 | ATXN7L1 | NM_020725 | down | up |
| 289 | B3GNT2 | NM_006577 | up | down |
| 290 | BCAR3 | NM_003567 | up | down |
| 291 | BCL3 | NM_005178 | up | down |
| 292 | BIRC2 | NM_001166 | up | down |
| 293 | BMP2 | NM_001200 | up | down |
| 294 | BRIX1 | NM_018321 | up | down |
| 295 | C10orf78 | NM_145247 | down | up |
| 296 | C16orf52 | NM_001164579 | up | down |
| 297 | C2CD2 | NM_015500 | up | down |
| 298 | C5orf33 | NM_001085411 | down | up |
| 299 | C6orf130 | AJ420538 | down | up |
| 300 | C6orf70 | NM_018341 | down | up |
| 301 | CALD1 | NM_033138 | up | down |
| 302 | CCDC113 | NM_014157 | down | up |
| 303 | CCL2 | NM_002982 | up | down |
| 304 | CD274 | NM_014143 | up | down |
| 305 | CDK7 | NM_001799 | up | down |
| 306 | CHST2 | NM_004267 | up | down |
| 307 | CIRBP | NM_001280 | down | up |
| 308 | CITED2 | NM_006079 | up | down |
| 309 | CNST | NM_152609 | up | down |
| 310 | COL4A5 | NM_000495 | down | up |
| 311 | CRY1 | NM_004075 | up | down |
| 312 | CSF2 | NM_000758 | up | down |
| 313 | CSGALNACT2 | NM_018590 | up | down |
| 314 | CSRP2BP | NM_020536 | down | up |
| 315 | DAB2 | NM_001343 | up | down |
| 316 | DCUN1D3 | NM_173475 | up | down |
| 317 | DDAH1 | NM_012137 | up | down |
| 318 | DDX21 | NM_004728 | up | down |
| 319 | DNAJB4 | NM_007034 | up | down |
| 320 | DOK5 | NM_018431 | up | down |
| 321 | DOT1L | NM_032482 | up | down |
| 322 | DSN1 | NM_001145316 | down | up |
| 323 | DTX4 | NM_015177 | up | down |
| 324 | DZIP1 | NM_198968 | down | up |
| 325 | EDN1 | NM_001955 | up | down |
| 326 | EHD1 | NM_006795 | up | down |
| 327 | EIF2C2 | NM_012154 | up | down |
| 328 | ELF1 | NM_172373 | up | down |
| 329 | ELK3 | NM_005230 | up | down |
| 330 | EMP1 | NM_001423 | up | down |
| 331 | ENOSF1 | NM_017512 | down | up |
| 332 | ENTPD7 | NM_020354 | up | down |
| 333 | EPM2AIP1 | NM_014805 | down | up |
| 334 | EREG | NM_001432 | up | down |
| 335 | ESM1 | NM_007036 | up | down |
| 336 | EYA1 | NM_000503 | down | up |
| 337 | FAM120C | NM_017848 | down | up |
| 338 | FAM126B | NM_173822 | up | down |
| 339 | FAM180A | NM_205855 | up | down |
| 340 | FAM46C | NM_017709 | up | down |
| 341 | FBXL4 | NM_012160 | down | up |
| 342 | FGF2 | NM_002006 | up | down |
| 343 | FGF7 | NM_002009 | up | down |
| 344 | FHL2 | NM_201555 | up | down |
| 345 | FLRT2 | NM_013231 | down | up |
| 346 | FMN1 | NM_001103184 | up | down |
| 347 | FOXN2 | NM_002158 | up | down |
| 348 | FSTL1 | NM_007085 | up | down |
| 349 | GALT | NM_000155 | down | up |
| 350 | GJC1 | NM_005497 | up | down |
| 351 | GLIPR1 | NM_006851 | up | down |
| 352 | GPR176 | NM_007223 | up | down |
| 353 | GPR37 | NM_005302 | up | down |
| 354 | GUSBP3 | NR_027386 | down | up |
| 355 | GZF1 | NM_022482 | down | up |
| 356 | H1F0 | NM_005318 | down | up |
| 357 | HDDC3 | NM_198527 | down | up |
| 358 | HIST2H2BF | NM_001024599 | down | up |
| 359 | HMGCR | NM_000859 | down | up |
| 360 | HMGCS1 | NM_001098272 | down | up |
| 361 | HMMR | NM_001142556 | down | up |
| 362 | HS6ST1 | NM_004807 | down | up |
| 363 | HSD17B7P2 | NR_003086 | down | up |
| 364 | IER3 | NM_003897 | up | down |
| 365 | IGF2BP2 | NM_006548 | up | down |
| 366 | IL6 | NM_000600 | up | down |
| 367 | IL7R | NM_002185 | up | down |
| 368 | JMJD6 | NM_001081461 | up | down |
| 369 | KCNRG | NM_173605 | down | up |
| 370 | KCTD10 | NM_031954 | up | down |
| 371 | KCTD11 | NM_001002914 | up | down |
| 372 | KCTD18 | NM_152387 | down | up |
| 373 | KIAA0586 | NM_014749 | down | up |
| 374 | KIAA0776 | NM_015323 | down | up |
| 375 | KIAA0922 | NM_001131007 | up | down |
| 376 | KIAA1377 | NM_020802 | down | up |
| 377 | KLF6 | NM_001300 | up | down |
| 378 | KRTAP4-12 | NM_031854 | up | down |
| 379 | LACTB | NM_032857 | up | down |
| 380 | LATS2 | NM_014572 | up | down |
| 381 | LIAS | NM_006859 | down | up |
| 382 | LIMD1 | NM_014240 | up | down |
| 383 | LOC100130691 | NR_026966 | down | up |
| 384 | LOC100130876 | AK130278 | up | down |
| 385 | LOC100131860 | AK097109 | down | up |
| 386 | LOC100133299 | AY358688 | up | down |
| 387 | LOC100133315 | NR_029192 | down | up |
| 388 | LOC400464 | AK127420 | down | up |
| 389 | LRCH1 | NM_001164211 | up | down |
| 390 | LRRCC1 | NM_033402 | down | up |
| 391 | MAP3K8 | NM_005204 | up | down |
| 392 | MAP4K3 | NM_003618 | up | down |
| 393 | MAST4 | NM_001164664 | up | down |
| 394 | MBLAC2 | NM_203406 | down | up |
| 395 | MBNL1 | NM_021038 | up | down |
| 396 | MIR218-1 | NR_029631 | up | down |
| 397 | MIR221 | NR_029635 | up | down |
| 398 | MRM1 | NM_024864 | down | up |
| 399 | MSH5 | NM_002441 | down | up |
| 400 | MYO1E | NM_004998 | up | down |
| 401 | NAB2 | NM_005967 | up | down |
| 402 | NAPEPLD | NM_001122838 | down | up |
| 403 | NCEH1 | NM_001146276 | up | down |
| 404 | NDEL1 | NM_001025579 | up | down |
| 405 | NEU3 | NM_006656 | down | up |
| 406 | NFAT5 | NM_138714 | up | down |
| 407 | NFKB1 | NM_003998 | up | down |
| 408 | NFKBIE | NM_004556 | up | down |
| 409 | NFX1 | NM_002504 | down | up |
| 410 | NPC1 | NM_000271 | up | down |
| 411 | NRIP1 | NM_003489 | up | down |
| 412 | NUDT12 | NM_031438 | down | up |
| 413 | NUFIP2 | NM_020772 | up | down |
| 414 | ORC5 | NM_002553 | down | up |
| 415 | PALB2 | NM_024675 | down | up |
| 416 | PATZ1 | NM_014323 | down | up |
| 417 | PDCD1LG2 | NM_025239 | up | down |
| 418 | PDP1 | NM_001161778 | up | down |
| 419 | PEA15 | NM_003768 | up | down |
| 420 | PEX1 | NM_000466 | down | up |
| 421 | PEX11B | NM_003846 | down | up |
| 422 | PIK3R3 | NM_003629 | down | up |
| 423 | PMS1 | NM_000534 | down | up |
| 424 | PPM1K | NM_152542 | down | up |
| 425 | PPP1R3B | NM_024607 | up | down |
| 426 | PPP1R3C | NM_005398 | down | up |
| 427 | PRDM6 | NM_001136239 | down | up |
| 428 | PRKCD | NM_006254 | up | down |
| 429 | PRSS22 | NM_022119 | up | down |
| 430 | PTCD2 | NM_024754 | down | up |
| 431 | PTPN12 | NM_002835 | up | down |
| 432 | PTX3 | NM_002852 | up | down |
| 433 | RAB8B | NM_016530 | up | down |
| 434 | RAI14 | NM_001145525 | up | down |
| 435 | RBMS1 | NM_016836 | up | down |
| 436 | RCOR3 | NM_001136223 | down | up |
| 437 | REV3L | NM_002912 | down | up |
| 438 | RND3 | NM_005168 | up | down |
| 439 | RNF19A | NM_183419 | up | down |
| 440 | RP2 | NM_006915 | up | down |
| 441 | RWDD2B | NM_016940 | down | up |
| 442 | SAMD4A | NM_015589 | up | down |
| 443 | SCN8A | NM_014191 | up | down |
| 444 | SDC4 | NM_002999 | up | down |
| 445 | SEC24A | NM_021982 | up | down |
| 446 | SEC24B | NM_006323 | up | down |
| 447 | SENP8 | NM_145204 | down | up |
| 448 | SERPINB2 | NM_001143818 | up | down |
| 449 | SESN1 | NM_014454 | down | up |
| 450 | SGK223 | NM_001080826 | up | down |
| 451 | SGMS2 | NM_001136258 | up | down |
| 452 | SIRT5 | NM_031244 | down | up |
| 453 | SKIL | NM_005414 | up | down |
| 454 | SLC16A14 | NM_152527 | down | up |
| 455 | SLC24A1 | NM_004727 | down | up |
| 456 | SLITRK6 | NM_032229 | down | up |
| 457 | SPOPL | NM_001001664 | up | down |
| 458 | SRBD1 | NM_018079 | down | up |
| 459 | SRF | NM_003131 | up | down |
| 460 | SRGAP1 | NM_020762 | up | down |
| 461 | ST3GAL3 | NM_174963 | down | up |
| 462 | STK17B | NM_004226 | up | down |
| 463 | STK36 | NM_015690 | down | up |
| 464 | STX11 | NM_003764 | up | down |
| 465 | STXBP5 | NM_001127715 | up | down |
| 466 | SYNE1 | NM_182961 | up | down |
| 467 | TACC2 | NM_206862 | down | up |
| 468 | TBX5 | NM_181486 | down | up |
| 469 | TK2 | NM_004614 | down | up |
| 470 | TMEM192 | NM_001100389 | down | up |
| 471 | TNFRSF12A | NM_016639 | up | down |
| 472 | TP53BP2 | NM_005426 | up | down |
| 473 | TP53INP1 | NM_033285 | down | up |
| 474 | TRIB1 | NM_025195 | up | down |
| 475 | TRIO | NM_007118 | up | down |
| 476 | TSC22D3 | NM_198057 | down | up |
| 477 | TSEN2 | NM_025265 | down | up |
| 478 | UAP1 | NM_003115 | up | down |
| 479 | USP13 | NM_003940 | down | up |
| 480 | USP40 | NM_018218 | down | up |
| 481 | USP53 | NM_019050 | up | down |
| 482 | VCL | NM_014000 | up | down |
| 483 | VEGFC | NM_005429 | up | down |
| 484 | ZBTB1 | NM_001123329 | up | down |
| 485 | ZNF143 | NM_003442 | up | down |
| 486 | ZNF18 | NM_144680 | down | up |
| 487 | ZNF25 | NM_145011 | down | up |
| 488 | ZNF331 | NM_018555 | down | up |
| 489 | ZNF362 | NM_152493 | down | up |
| 490 | ZNF43 | NM_003423 | down | up |
| 491 | ZNF469 | NM_001127464 | up | down |
| 492 | ZNF717 | NM_001128223 | down | up |
| 493 | ZNF76 | NM_003427 | down | up |
| 494 | ZNF800 | NM_176814 | up | down |
| 495 | ZNF804A | NM_194250 | up | down |
| 496 | ZNRD1-AS | AF032109 | down | up |
| 497 | ZRANB1 | NM_017580 | up | down |
| 498 | ZSWIM6 | NM_020928 | up | down |
| 499 | ZYX | NM_003461 | up | down |

TABLE 4A
Differentially expressed mRNAs (List of selected LPA-induced
genes in fibroblasts (average of 3 experiments)).

| | | | Effect of 1 μM |
|---|---|---|---|
| | | Effect of 1 | BMS-986020 |
| | | μM LPA | relative to |
| | | (fold- | induced cells |
| Gene | | change) | (fold-change) |
| CYR61 | cysteine-rich, angiogenic inducer, 61 | 6.52 | −7.53 |
| KRTAP1-5 | keratin associated protein 1-5 | 6.49 | −6.89 |
| DKK1 | dickkopf homolog 1 | 6.36 | −6.16 |
| MCP-1/ | chemokine (C-C motif) ligand 2 | 5.58 | −5.99 |
| CCL2 | | | |
| LIF | leukemia inhibitory factor | 5.15 | −5.07 |
| HBEGF | heparin-binding EGF-like growth factor | 5.11 | −5.41 |
| CTGF | connective tissue growth factor | 4.71 | −4.62 |
| KPRP | keratinocyte proline-rich protein | 4.31 | −3.81 |
| IL6 | interleukin 6 | 4.19 | −4.08 |
| TNFAIP3 | tumor necrosis factor, α-induced | 3.44 | −3.68 |
| | protein 3 | | |
| KRTAP4-12 | keratin associated protein 4-12 | 3.23 | −3.90 |
| BIRC3 | baculoviral IAP repeat-containing 3 | 3.17 | −3.33 |
| MIR218-1 | microRNA 218-1 | 3.07 | −2.82 |
| VGLL3 | vestigial like 3 | 2.96 | −2.97 |
| IER3 | immediate early response 3 | 2.94 | −3.28 |
| GPR37 | G protein-coupled receptor 37 | 2.80 | −3.13 |
| DUSP1 | dual specificity phosphatase 1 | 2.76 | −2.56 |
| EFNB2 | ephrin-B2 | 2.61 | −2.63 |
| HAS2 | hyaluronan synthase 2 | 2.61 | −2.89 |
| PDCD1LG2 | programmed cell death 1 ligand 2 | 2.52 | −2.51 |
| SERPINB2 | serpin peptidase inhibitor, clade B | 2.44 | −2.64 |
| UGCG | UDP-glucose ceramide | 2.41 | −2.52 |
| | glucosyltransferase | | |
| CHIC2 | cysteine-rich hydrophobic domain 2 | 2.36 | −2.40 |
| PTX3 | pentraxin 3 | 2.34 | −2.49 |
| PAI-1 | serpin peptidase inhibitor, clade E | 2.28 | −2.43 |
| CNST | consortin, connexin sorting protein | 2.26 | −2.32 |
| TXNIP | thioredoxin interacting protein | −3.79 | 4.41 |

TABLE 4B
Differentially expressed mRNAs as listed in Table 4A including
sequence identifiers (SEQ ID NO:) (List of selected LPA-induced
genes in fibroblasts (average of 3 experiments)).

| SEQ ID NO: | Gene Symbol |
|---|---|
| 211 | CYR61 |
| 243 | KRTAP1-5 |
| 218 | DKK1 |
| 303 | MCP-1/CCL-2 |
| 237 | HBEGF |
| 216 | CTGF |
| 242 | KPRP |
| 267 | IL6TNFAIP3 |
| 378 | KRTAP4-12 |
| 209 | BIRC3 |
| 396 | MIR218-1 |
| 271 | VGLL3 |
| 364 | IER3 |
| 353 | GPR37 |
| 219 | DUSP1 |
| 222 | EFNB2 |
| 236 | HAS2 |
| 417 | PDCD1LG2 |
| 448 | SERPINB2 |
| 270 | UGCG |
| 214 | CHIC2 |
| 432 | PTX3 |
| 309 | CNST |
| 269 | TXNIP |

TABLE 5
LPA-induced proteins independently associated with IPF.

| | | IPF vs. |
|---|---|---|
| | | control |
| | | (fold- |
| Protein | | change) |
| CXCL2/3 | Gro-b/g | 1.62 |
| ANGPT1 | Angiopoietin-1 | 1.36 |
| p41 | P41 | 1.53 |
| GREM1 | Gremlin 1 | 1.57 |
| NID2 | Nidogen 2 (osteonidogen) | 1.45 |
| NET4 | Transmembrane protein 53 | 1.28 |
| NXPH1 | Neuroexophilin 1 | 1.41 |
| PAI-1 | Serpine peptidase inhibitor, | 1.53 |
| | clade E | |
| TSP-1 | Thrombospondin-1 | 1.47 |
| TIMP-3 | TIMP metallopeptidase | 1.43 |
| | inhibitor 3 | |
| CTAP-III | Pro-platelet basic protein | 1.43 |
| DDR2 | Discoidin domain receptor | 1.25 |
| | tyrosine kinase 2 | |
| MMP-1 | Matrix metallopeptidase 1 | 1.51 |
| MMP-9 | Matrix metallopeptidase 9 | 1.49 |
| NAP-2 | Napsin B aspartic peptidase | 1.53 |

### X. Embodiments

### Embodiments I

### Embodiment 1

[0194] A method of determining an expression level of an LPA-associated disease marker protein as set forth in Table 1 or Table 2 in a subject that has or is at risk for developing an LPA-associated disease, said method comprising: (i) obtaining a biological sample from said subject; and (ii) determining an expression level of an LPA-associated disease marker protein set forth in Table 1 or Table 2 in said biological sample.

### Embodiment 2

[0195] The method of embodiment 1, wherein said determining comprises: (a) contacting a LPA-associated disease marker protein with a marker protein binding agent in said biological sample, thereby forming a disease marker protein-binding agent complex; and (b) detecting said disease marker protein-binding agent complex.

### Embodiment 3

[0196] The method of embodiment 1, further comprising selecting a subject that has or is at risk for developing an LPA-associated disease.

### Embodiment 4

[0197] The method of embodiment 1, wherein said biological sample is a blood-derived biological sample, a urine-derived biological sample or a saliva-derived biological sample of said subject.

### Embodiment 5

[0198] The method of embodiment 4, wherein said blood-derived biological sample is whole blood, serum or plasma.

### Embodiment 6

[0199] The method of embodiment 1, further comprising administering to said subject an effective amount of a modulator of said LPA-associated disease marker protein set forth in Table 1 or Table 2.

### Embodiment 7

[0200] The method of embodiment 6, wherein said modulator is an antagonist.

### Embodiment 8

[0201] The method of embodiment 7, wherein said antagonist is a peptide, small molecule, nucleic acid, antibody or aptamer.

### Embodiment 9

[0202] The method of embodiment 7, wherein said expression level of said LPA-associated disease marker protein set forth in Table 1 or Table 2 is elevated relative to a standard control.

### Embodiment 10

[0203] The method of embodiment 6, wherein said modulator is an agonist.

### Embodiment 11

[0204] The method of embodiment 10, wherein said agonist is a peptide, small molecule, nucleic acid, antibody or aptamer.

### Embodiment 12

[0205] The method of embodiment 10, wherein said expression level of said LPA-associated disease marker protein set forth in Table 1 or Table 2 is decreased relative to a standard control.

### Embodiment 13

[0206] The method of embodiment 6, further comprising administering to said subject an effective amount of a further therapeutic agent.

### Embodiment 14

[0207] A method of determining an expression level of an LPA-associated disease marker RNA set forth in Table 3 or Table 4 in a subject that has or is at risk for developing an LPA-associated disease, said method comprising: (i) obtaining a biological sample from said subject; and (ii) determining an expression level of an LPA-associated disease marker RNA set forth in Table 3 or Table 4 in said biological sample.

### Embodiment 15

[0208] The method of embodiment 14, further comprising selecting a subject that has or is at risk for developing an LPA-associated disease.

### Embodiment 16

[0209] The method of embodiment 14, wherein said biological sample is a blood-derived biological sample, a urine-derived biological sample or a saliva-derived biological sample of said subject.

### Embodiment 17

[0210] The method of embodiment 16, wherein said blood-derived biological sample is whole blood, serum or plasma.

### Embodiment 18

[0211] The method of embodiment 14, further comprising administering to said subject an effective amount of a modulator of said LPA-associated disease marker RNA set forth in Table 3 or Table 4.

### Embodiment 19

[0212] The method of embodiment 18, wherein said modulator is an antagonist.

### Embodiment 20

[0213] The method of embodiment 19, wherein said antagonist is a peptide, small molecule, nucleic acid, antibody or aptamer.

### Embodiment 21

[0214] The method of embodiment 19, wherein said expression level of said LPA-associated disease marker RNA set forth in Table 3 or Table 4 is elevated relative to a standard control.

### Embodiment 22

[0215] The method of embodiment 18, wherein said modulator is an agonist.

### Embodiment 23

[0216] The method of embodiment 22, wherein said agonist is a peptide, small molecule, nucleic acid, antibody or aptamer.

### Embodiment 24

[0217] The method of embodiment 22, wherein said expression level of said LPA-associated disease marker RNA set forth in Table 3 or Table 4 is decreased relative to a standard control.

### Embodiment 25

[0218] The method of embodiment 18, further comprising administering to said subject an effective amount of a further therapeutic agent.

### Embodiment 26

[0219] A method of determining whether a subject has or is at risk of developing an LPA-associated disease, said method comprising: (i) detecting an expression level of one or more LPA-associated disease marker proteins set forth in Table 1 or Table 2 in a subject; (ii) determining whether said expression level is increased or decreased relative to a standard control, wherein an elevated expression level of an LPA-associated disease marker protein set forth in Table 1 or Table 2 or a decreased expression level of an LPA-associated disease marker protein set forth in Table 1 or Table 2 relative to said standard control indicates that said subject has or is at risk of developing an LPA-associated disease; and (iii) based at least in part on said expression level in step (ii), determining whether said subject has or is at risk for developing an LPA-associated disease.

### Embodiment 27

[0220] The method of embodiment 26, further comprising selecting a subject that has or is at risk for developing an LPA-associated disease.

### Embodiment 28

[0221] The method of embodiment 26, wherein said expression level of one or more LPA-associated disease marker proteins set forth in Table 1 or Table 2 is detected from a biological sample of said subject.

### Embodiment 29

[0222] The method of embodiment 28, wherein said biological sample is a blood-derived biological sample, a urine-derived biological sample or a saliva-derived biological sample of said subject.

### Embodiment 30

[0223] The method of embodiment 29, wherein said blood-derived biological sample is whole blood, serum or plasma.

### Embodiment 31

[0224] The method of embodiment 26, further comprising administering to said subject an effective amount of a modulator of said LPA-associated disease marker protein set forth in Table 1 or Table 2.

### Embodiment 32

[0225] The method of embodiment 31, wherein said modulator is an antagonist.

### Embodiment 33

[0226] The method of embodiment 32, wherein said antagonist is a peptide, small molecule, nucleic acid, antibody or aptamer.

### Embodiment 34

[0227] The method of embodiment 31, wherein said modulator is an agonist.

### Embodiment 35

[0228] The method of embodiment 34, wherein said agonist is a peptide, small molecule, nucleic acid, antibody or aptamer.

### Embodiment 36

[0229] The method of embodiment 31, further comprising administering to said subject an effective amount of a further therapeutic agent.

### Embodiment 37

[0230] A method of determining whether a subject has or is at risk of developing an LPA-associated disease, said method comprising: (i) detecting an expression level of one or more LPA-associated disease marker RNAs set forth in Table 3 or Table 4 in a subject; (ii) determining whether said expression level is increased or decreased relative to a standard control, wherein an elevated expression level of an LPA-associated disease marker RNA set forth in Table 3 or Table 4 or a decreased expression level of an LPA-associated disease marker RNA set forth in Table 3 or Table 4 relative to said standard control indicates that said subject has or is at risk of developing an LPA-associated disease; and (iii) based at least in part on said expression level in step (ii), determining whether said subject has or is at risk for developing an LPA-associated disease.

### Embodiment 38

[0231] The method of embodiment 37, further comprising selecting a subject that has or is at risk for developing an LPA-associated disease.

### Embodiment 39

[0232] The method of embodiment 37, wherein said expression level of one or more LPA-associated disease marker RNAs set forth in Table 3 or Table 4 is detected from a biological sample of said subject.

### Embodiment 40

[0233] The method of embodiment 39, wherein said biological sample is a blood-derived biological sample, a urine-derived biological sample or a saliva-derived biological sample of said subject.

### Embodiment 41

[0234] The method of embodiment 40, wherein said blood-derived biological sample is whole blood, serum or plasma.

### Embodiment 42

[0235] The method of embodiment 37, further comprising administering to said subject an effective amount of a modulator of said LPA-associated disease marker RNA set forth in Table 3 or Table 4.

### Embodiment 43

[0236] The method of embodiment 42, wherein said modulator is an antagonist.

### Embodiment 44

[0237] The method of embodiment 43, wherein said antagonist is a peptide, small molecule, nucleic acid, antibody or aptamer.

### Embodiment 45

[0238] The method of embodiment 42, wherein said modulator is an agonist.

### Embodiment 46

[0239] The method of embodiment 45, wherein said agonist is a peptide, small molecule, nucleic acid, antibody or aptamer.

### Embodiment 47

[0240] The method of embodiment 42, further comprising administering to said subject an effective amount of a further therapeutic agent.

### Embodiment 48

[0241] A method of determining an LPA-associated disease activity in a patient, said method comprising: (i) determining a first expression level of a protein set forth in Table 1 or Table 2 in said patient at a first time point; (ii) determining a second expression level of a protein set forth in Table 1 or Table 2 in said patient at a second time point; (iii) comparing said second expression level of a protein set forth in Table 1 or Table 2 to said first expression level of a protein set forth in Table 1 or Table 2, thereby determining said LPA-associated disease activity in said patient.

### Embodiment 49

[0242] A method of determining an LPA-associated disease activity in a patient, said method comprising: (i) determining a first expression level of an RNA set forth in Table 3 or Table 4 in said patient at a first time point; (ii) determining a second expression level of an RNA set forth in Table 3 or Table 4 in said patient at a second time point; (iii) comparing said second expression level of an RNA set forth in Table 3 or Table 4 to said first expression level of an RNA set forth in Table 3 or Table 4, thereby determining said LPA-associated disease activity in said patient.

### Embodiment 50

[0243] A method of treating an LPA-associated disease in a subject in need thereof, said method comprising administering to said subject an effective amount of an modulator of an LPA-associated disease marker protein set forth in Table 1 or Table 2, thereby treating an LPA-associated disease in said subject.

### Embodiment 51

[0244] A method of treating an LPA-associated disease in a subject in need thereof, said method comprising administering to said subject an effective amount of an modulator of an LPA-associated disease marker RNA set forth in Table 3 or Table 4, thereby treating an LPA-associated disease in said subject.

### Embodiment 52

[0245] A method of treating an LPA-associated disease in a subject in need thereof, said method comprising: (i) determining whether a subject expresses an elevated level or a decreased level of an LPA-associated disease marker protein set forth in Table 1 or Table 2 relative to a standard control; and (ii) when an elevated expression level or a decreased expression level of said LPA-associated disease marker protein set forth in Table 1 or Table 2 is found relative to said standard control, administering to said subject an LPA-associated disease treatment, an antagonist or an agonist of an LPA-associated disease marker protein set forth in Table 1 or Table 2, thereby treating said subject.

### Embodiment 53

[0246] A method of treating an LPA-associated disease in a subject in need thereof, said method comprising: (i) determining whether a subject expresses an elevated level or a decreased level of an LPA-associated disease marker RNA set forth in Table 3 or Table 4 relative to a standard control; and (ii) when an elevated expression level or a decreased expression level of said LPA-associated disease marker RNA set forth in Table 3 or Table 4 is found relative to said standard control, administering to said subject an LPA-associated disease treatment, an antagonist or an agonist of an LPA-associated disease marker RNA set forth in Table 3 or Table 4, thereby treating said subject.

### Embodiment 54

[0247] A method of determining whether an LPA-associated disease patient is at risk for progression of the LPA-associated disease, the method comprising: (i) detecting an expression level of one or more LPA-associated disease marker proteins set forth in Table 1 or Table 2 in an LPA-associated disease patient; (ii) determining whether said expression level is modulated relative to a standard control, wherein a modulated expression level of an LPA-associated disease marker protein set forth in Table 1 or Table 2 relative to said standard control indicates that said LPA-associated disease patient is at risk for progression of said LPA-associated disease; and (iii) based at least in part on said expression level in step (ii), determining whether said LPA-associated disease patient is at risk for progression of said LPA-associated disease.

### Embodiment 55

[0248] A method of determining whether an LPA-associated disease patient is at risk for progression of the LPA-associated disease, the method comprising: (i) detecting an expression level of one or more LPA-associated disease marker RNAs set forth in Table 3 or Table 4 in an LPA-associated disease patient; (ii) determining whether said expression level is modulated relative to a standard control, wherein a modulated expression level of an LPA-associated disease marker RNA set forth in Table 3 or Table 4 relative to said standard control indicates that said LPA-associated disease patient is at risk for progression of said LPA-associated disease; and (iii) based at least in part on said expression level in step (ii), determining whether said LPA-associated disease patient is at risk for progression of said LPA-associated disease.

### Embodiments II

### Embodiment 1

[0249] A method of determining an expression level of an LPA-associated disease marker protein of SEQ ID NO:1-202 in a subject that has or is at risk for developing an LPA-associated disease, said method comprising: (i) obtaining a biological sample from said subject; and (ii) determining an expression level of an LPA-associated disease marker protein of SEQ ID NO:1-202 in said biological sample.

### Embodiment 2

[0250] The method of embodiment 1, wherein said determining comprises: (a) contacting said LPA-associated disease marker protein with a marker protein binding agent in said biological sample, thereby forming a disease marker protein-binding agent complex; and (b) detecting said disease marker protein-binding agent complex.

### Embodiment 3

[0251] The method of embodiment 2, wherein said marker protein binding agent comprises a detectable moiety.

### Embodiment 4

[0252] The method of embodiment 2, wherein said marker protein binding agent comprises a capturing moiety.

### Embodiment 5

[0253] The method of embodiment 4, wherein said capturing moiety is a cleavable capturing moiety.

### Embodiment 6

[0254] The method of one of embodiments 2-5, wherein said detecting comprises contacting said disease marker protein-binding agent complex with a capturing agent, thereby forming a captured disease marker protein-binding agent complex.

### Embodiment 7

[0255] The method of embodiment 6, wherein said detecting further comprises: (1) contacting said captured disease marker protein-binding agent complex with a tagging moiety; thereby forming a tagged disease marker protein-binding agent complex; and (2) separating said tagged disease marker protein-binding agent complex from said biological sample.

### Embodiment 8

[0256] The method of embodiment 7, wherein said detecting further comprises after said separating of step (2) separating said capturing binding agent from said tagged disease marker protein-binding agent complex, thereby forming a cleaved disease marker protein-binding agent complex.

### Embodiment 9

[0257] The method of embodiment 8, wherein said detecting further comprises: (3) separating said marker protein binding agent from said cleaved disease marker protein-binding agent complex; thereby forming a released marker protein binding agent; and (4) determining an amount of said released marker protein binding agent.

### Embodiment 10

[0258] The method of one of embodiments 1-9, further comprising selecting a subject that has or is at risk for developing an LPA-associated disease.

### Embodiment 11

[0259] The method of one of embodiments 1-10, wherein said biological sample is a blood-derived biological sample, a urine-derived biological sample or a saliva-derived biological sample of said subject.

### Embodiment 12

[0260] The method of embodiment 11, wherein said blood-derived biological sample is whole blood, serum or plasma.

### Embodiment 13

[0261] The method of one of embodiments 1-12, further comprising administering to said subject an effective amount of a modulator of said LPA-associated disease marker protein of SEQ ID NO:1-202.

### Embodiment 14

[0262] The method of embodiment 13, wherein said modulator is an antagonist.

### Embodiment 15

[0263] The method of embodiment 14 wherein said antagonist is a peptide, small molecule, nucleic acid, antibody or aptamer

### Embodiment 16

[0264] The method of embodiment 14, wherein said expression level of said LPA-associated disease marker protein of SEQ ID NO:1-202 is elevated relative to a standard control.

### Embodiment 17

[0265] The method of embodiment 13, wherein said modulator is an agonist.

### Embodiment 18

[0266] The method of embodiment 17, wherein said agonist is a peptide, small molecule, nucleic acid, antibody or aptamer.

### Embodiment 19

[0267] The method of embodiment 17, wherein said expression level of said LPA-associated disease marker protein of SEQ ID NO:1-202 is decreased relative to a standard control.

### Embodiment 20

[0268] The method of one of embodiments 13-19, further comprising administering to said subject an effective amount of a further therapeutic agent.

### Embodiment 21

[0269] The method of one of embodiments 1-20, wherein said LPA-associated disease marker protein is SEQ ID NO:9, SEQ ID NO:23, SEQ ID NO:32, SEQ ID NO:47, SEQ ID NO:58, SEQ ID NO:90, SEQ ID NO:93, SEQ ID NO:102, SEQ ID NO:118, SEQ ID NO:131, SEQ ID NO:136, SEQ ID NO:139, SEQ ID NO:141, SEQ ID NO:143, SEQ ID NO:149, SEQ ID NO:152, SEQ ID NO:160, SEQ ID NO:164, SEQ ID NO:183 or SEQ ID NO:185.

### Embodiment 22

[0270] A method of determining an expression level of an LPA-associated disease marker RNA of SEQ ID NO:203-499 in a subject that has or is at risk for developing an LPA-associated disease, said method comprising: (i) obtaining a biological sample from said subject; and (ii) determining an expression level of an LPA-associated disease marker RNA of SEQ ID NO:203-499 in said biological sample.

### Embodiment 23

[0271] The method of embodiment 22, wherein said determining comprises: (a) contacting said LPA-associated disease marker RNA with a marker RNA binding agent in said biological sample, thereby forming a disease marker RNA-binding agent complex; and (b) detecting said disease marker RNA-binding agent complex.

### Embodiment 24

[0272] The method of embodiment 23, wherein said marker RNA binding agent comprises a detectable moiety.

### Embodiment 25

[0273] The method of embodiment 23, wherein said marker RNA binding agent comprises a capturing moiety.

### Embodiment 26

[0274] The method of embodiment 25, wherein said capturing moiety is a cleavable capturing moiety.

### Embodiment 27

[0275] The method of one of embodiments 23-26, wherein said detecting comprises contacting said disease marker RNA-binding agent complex with a capturing agent, thereby forming a captured disease marker RNA-binding agent complex.

### Embodiment 28

[0276] The method of embodiment 27, wherein said detecting further comprises: (1) contacting said captured disease marker RNA-binding agent complex with a tagging moiety; thereby forming a tagged disease marker RNA-binding agent complex; and (2) separating said tagged disease marker RNA-binding agent complex from said biological sample.

### Embodiment 29

[0277] The method of embodiment 28, wherein said detecting further comprises after said separating of step (2) separating said capturing binding agent from said tagged disease marker RNA-binding agent complex, thereby forming a cleaved disease marker RNA-binding agent complex.

### Embodiment 30

[0278] The method of embodiment 29, wherein said detecting further comprises: (3) separating said marker RNA binding agent from said cleaved disease marker RNA-binding agent complex; thereby forming a released marker RNA binding agent; and (4) determining an amount of said released marker RNA binding agent.

### Embodiment 31

[0279] The method of one of embodiments 22-30, further comprising selecting a subject that has or is at risk for developing an LPA-associated disease.

### Embodiment 32

[0280] The method of one of embodiments 22-31, wherein said biological sample is a blood-derived biological sample, a urine-derived biological sample or a saliva-derived biological sample of said subject

### Embodiment 33

[0281] The method of embodiment 32, wherein said blood-derived biological sample is whole blood, serum or plasma.

### Embodiment 34

[0282] The method of one of embodiments 22-33, further comprising administering to said subject an effective amount of a modulator of said LPA-associated disease marker RNA of SEQ ID NO:203-499.

### Embodiment 35

[0283] The method of embodiment 34, wherein said modulator is an antagonist.

### Embodiment 36

[0284] The method of embodiment 35, wherein said antagonist is a peptide, small molecule, nucleic acid, antibody or aptamer.

### Embodiment 37

[0285] The method of embodiment 35, wherein said expression level of said LPA-associated disease marker RNA of SEQ ID NO:203-499 is elevated relative to a standard control.

### Embodiment 38

[0286] The method of embodiment 34, wherein said modulator is an agonist.

### Embodiment 39

[0287] The method of embodiment 38, wherein said agonist is a peptide, small molecule, nucleic acid, antibody or aptamer.

### Embodiment 40

[0288] The method of embodiment 38, wherein said expression level of said LPA-associated disease marker RNA of SEQ ID NO:203-499 is decreased relative to a standard control.

### Embodiment 41

[0289] The method of one of embodiments 34-40, further comprising administering to said subject an effective amount of a further therapeutic agent.

### Embodiment 42

[0290] The method of one of embodiments 22-41, wherein said LPA-associated disease marker RNA is SEQ ID NO:209, SEQ ID NO:214, SEQ ID NO:216, SEQ ID NO:217, SEQ ID NO:218, SEQ ID NO:219, SEQ ID NO:222, SEQ ID NO:236, SEQ ID NO:237, SEQ ID NO:242, SEQ ID NO:243, SEQ ID NO:267, SEQ ID NO:269, SEQ ID NO:270, SEQ ID NO:271, SEQ ID NO:303, SEQ ID NO:309, SEQ ID NO:353, SEQ ID NO:364, SEQ ID NO:378, SEQ ID NO:396, SEQ ID NO:417, SEQ ID NO:432 or SEQ ID NO:448.

### Embodiment 43

[0291] A method of determining whether a subject has or is at risk of developing an LPA-associated disease, said method comprising: (i) detecting an expression level of one or more LPA-associated disease marker proteins of SEQ ID NO:1-202 in a subject; (ii) determining whether said expression level is increased or decreased relative to a standard control, wherein an elevated expression level of an LPA-associated disease marker protein of SEQ ID NO:1-202 or a decreased expression level of an LPA-associated disease marker protein of SEQ ID NO:1-202 relative to said standard control indicates that said subject has or is at risk of developing an LPA-associated disease; and (iii) based at least in part on said expression level in step (ii), determining whether said subject has or is at risk for developing an LPA-associated disease.

### Embodiment 44

[0292] The method of embodiment 43, further comprising selecting a subject that has or is at risk for developing an LPA-associated disease.

### Embodiment 45

[0293] The method of embodiment 43, wherein said expression level of one or more LPA-associated disease marker proteins of SEQ ID NO:1-202 is detected from a biological sample of said subject.

### Embodiment 46

[0294] The method of embodiment 45, wherein said biological sample is a blood-derived biological sample, a urine-derived biological sample or a saliva-derived biological sample of said subject.

### Embodiment 47

[0295] The method of embodiment 46, wherein said blood-derived biological sample is whole blood, serum or plasma.

### Embodiment 48

[0296] The method of embodiment 43, further comprising administering to said subject an effective amount of a modulator of said LPA-associated disease marker protein of SEQ ID NO:1-202.

### Embodiment 49

[0297] The method of embodiment 48, wherein said modulator is an antagonist.

### Embodiment 50

[0298] The method of embodiment 49, wherein said antagonist is a peptide, small molecule, nucleic acid, antibody or aptamer.

### Embodiment 51

[0299] The method of embodiment 48, wherein said modulator is an agonist.

### Embodiment 52

[0300] The method of embodiment 51, wherein said agonist is a peptide, small molecule, nucleic acid, antibody or aptamer.

### Embodiment 53

[0301] The method of embodiment 48, further comprising administering to said subject an effective amount of a further therapeutic agent.

### Embodiment 54

[0302] A method of determining whether a subject has or is at risk of developing an LPA-associated disease, said method comprising: (i) detecting an expression level of one or more LPA-associated disease marker RNAs of SEQ ID NO:203-499 in a subject; (ii) determining whether said expression level is increased or decreased relative to a standard control, wherein an elevated expression level of an LPA-associated disease marker RNA of SEQ ID NO:203-499 or a decreased expression level of an LPA-associated disease marker RNA of SEQ ID NO:203-499 relative to said standard control indicates that said subject has or is at risk of developing an LPA-associated disease; and (iii) based at least in part on said expression level in step (ii), determining whether said subject has or is at risk for developing an LPA-associated disease.

### Embodiment 55

[0303] The method of embodiment 54, further comprising selecting a subject that has or is at risk for developing an LPA-associated disease.

### Embodiment 56

[0304] The method of embodiment 54, wherein said expression level of one or more LPA-associated disease marker RNAs of SEQ ID NO:203-499 is detected from a biological sample of said subject.

### Embodiment 57

[0305] The method of embodiment 56, wherein said biological sample is a blood-derived biological sample, a urine-derived biological sample or a saliva-derived biological sample of said subject.

### Embodiment 58

[0306] The method of embodiment 57, wherein said blood-derived biological sample is whole blood, serum or plasma.

### Embodiment 59

[0307] The method of embodiment 54, further comprising administering to said subject an effective amount of a modulator of said LPA-associated disease marker RNA of SEQ ID NO:203-499.

### Embodiment 60

[0308] The method of embodiment 59, wherein said modulator is an antagonist.

### Embodiment 61

[0309] The method of embodiment 60, wherein said antagonist is a peptide, small molecule, nucleic acid, antibody or aptamer.

### Embodiment 62

[0310] The method of embodiment 59, wherein said modulator is an agonist.

### Embodiment 63

[0311] The method of embodiment 62, wherein said agonist is a peptide, small molecule, nucleic acid, antibody or aptamer.

### Embodiment 64

[0312] The method of embodiment 59, further comprising administering to said subject an effective amount of a further therapeutic agent.

### Embodiment 65

[0313] A method of determining an LPA-associated disease activity in a patient, said method comprising: (i) determining a first expression level of a protein of SEQ ID NO:1-202 in said patient at a first time point; (ii) determining a second expression level of a protein of SEQ ID NO:1-202 in said patient at a second time point; (iii) comparing said second expression level of a protein of SEQ ID NO:1-202 to said first expression level of a protein of SEQ ID NO:1-202, thereby determining said LPA-associated disease activity in said patient.

### Embodiment 66

[0314] A method of determining an LPA-associated disease activity in a patient, said method comprising: (i) determining a first expression level of an RNA of SEQ ID NO:203-499 in said patient at a first time point; (ii) determining a second expression level of an RNA of SEQ ID NO:203-499 in said patient at a second time point; (iii) comparing said second expression level of an RNA of SEQ ID NO:203-499 to said first expression level of an RNA of SEQ ID NO:203-499, thereby determining said LPA-associated disease activity in said patient.

### Embodiment 67

[0315] A method of treating an LPA-associated disease in a subject in need thereof, said method comprising administering to said subject an effective amount of an modulator of an LPA-associated disease marker protein of SEQ ID NO:1-202, thereby treating an LPA-associated disease in said subject.

### Embodiment 68

[0316] A method of treating an LPA-associated disease in a subject in need thereof, said method comprising administering to said subject an effective amount of an modulator of an LPA-associated disease marker RNA of SEQ ID NO:203-499, thereby treating an LPA-associated disease in said subject.

### Embodiment 69

[0317] A method of treating an LPA-associated disease in a subject in need thereof, said method comprising: (i) determining whether a subject expresses an elevated level or a decreased level of an LPA-associated disease marker protein of SEQ ID NO:1-202 relative to a standard control; and (ii) when an elevated expression level or a decreased expression level of said LPA-associated disease marker protein of SEQ ID NO:1-202 is found relative to said standard control, administering to said subject an LPA-associated disease treatment, an antagonist or an agonist of an LPA-associated disease marker protein of SEQ ID NO:1-202, thereby treating said subject.

### Embodiment 70

[0318] A method of treating an LPA-associated disease in a subject in need thereof, said method comprising: (i) determining whether a subject expresses an elevated level or a decreased level of an LPA-associated disease marker RNA of SEQ ID NO:203-499 relative to a standard control; and (ii) when an elevated expression level or a decreased expression level of said LPA-associated disease marker RNA of SEQ ID NO:203-499 is found relative to said standard control, administering to said subject an LPA-associated disease treatment, an antagonist or an agonist of an LPA-associated disease marker RNA of SEQ ID NO:203-499, thereby treating said subject.

### Embodiment 71

[0319] A method of determining whether an LPA-associated disease patient is at risk for progression of the LPA-associated disease, the method comprising: (i) detecting an expression level of one or more LPA-associated disease marker proteins set forth of SEQ ID NO:1-202 in an LPA-associated disease patient; (ii) determining whether said expression level is modulated relative to a standard control, wherein a modulated expression level of an LPA-associated disease marker protein of SEQ ID NO:1-202 relative to said standard control indicates that said LPA-associated disease patient is at risk for progression of said LPA-associated disease; and (iii) based at least in part on said expression level in step (ii), determining whether said LPA-associated disease patient is at risk for progression of said LPA-associated disease.

### Embodiment 72

[0320] A method of determining whether an LPA-associated disease patient is at risk for progression of the LPA-associated disease, the method comprising: (i) detecting an expression level of one or more LPA-associated disease marker RNAs of SEQ ID NO:203-499 in an LPA-associated disease patient; (ii) determining whether said expression level is modulated relative to a standard control, wherein a modulated expression level of an LPA-associated disease marker RNA of SEQ ID NO:203-499 relative to said standard control indicates that said LPA-associated disease patient is at risk for progression of said LPA-associated disease; and (iii) based at least in part on said expression level in step (ii), determining whether said LPA-associated disease patient is at risk for progression of said LPA-associated disease.

### Embodiment 73

[0321] A complex in vitro comprising a marker protein binding agent bound to a LPA-associated disease marker protein of SEQ ID NO:1-202 or fragment thereof, wherein said LPA-associated disease marker protein is extracted from a human subject having or at risk of developing an LPA-associated disease.

### Embodiment 74

[0322] The complex of embodiment 73, wherein said subject has an LPA-associated disease.

### Embodiment 75

[0323] A complex in vitro comprising a marker RNA binding agent bound to a LPA-associated disease marker RNA of SEQ ID NO:203-499 or fragment thereof, wherein said LPA-associated disease marker RNA is extracted from a human subject having or at risk of developing an LPA-associated disease.

### Embodiment 76

[0324] The complex of embodiment 75, wherein said subject has an LPA-associated disease.

### Embodiment 77

[0325] A kit comprising: (a) a marker protein binding agent capable of binding to a substance within a biological sample from a human subject having or at risk of developing an LPA-associated disease; wherein said substance is an LPA-associated disease marker protein of SEQ ID NO:1-202 or fragment thereof; (b) a detecting reagent or a detecting apparatus capable of indicating binding of said marker protein binding agent to said substance.

### Embodiment 78

[0326] A kit comprising: (a) a marker RNA binding agent capable of binding to a substance within a biological sample from a human subject having or at risk of developing an LPA-associated disease; wherein said substance is an LPA-associated disease marker RNA of SEQ ID NO:203-499 or fragment thereof; (b) a detecting reagent or a detecting apparatus capable of indicating binding of said marker RNA binding agent to said substance.

The application's sequence listing, which the Patent Office published only in electronic form, follows.

SEQUENCE LISTING (499 sequences)

SEQ ID NO: 1 - protein, 864 aa, Homo sapiens
MTTEKSLVTEAENSQHQQKEEGEEAINSGQQEPQQEESCQTAAEGDNWCEQKLKASNGDTPTHEDLTKNKERTSESRGLSRLFSSFLKRPKSQVSEEEGKEVESDKEKGEGGQKEIEFGTSLDEEIILKAPIAAPEPELKTDPSLDLHSLSSAETQPAQEELREDPDFEIKEGEGLEECSKIEVKEESPQSKAETELKASQKPIRKHRNMHCKVSLLDDTVYECVVEKHAKGQDLLKRVCEHLNLLEEDYFGLAIWDNATSKTWLDSAKEIKKQVRGVPWNFTFNVKFYPPDPAQLTEDITRYYLCLQLRQDIVAGRLPCSFATLALLGSYTIQSELGDYDPELHGVDYVSDFKLAPNQTKELEEKVMELHKSYRSMTPAQADLEFLENAKKLSMYGVDLHKAKDLEGVDIILGVCSSGLLVYKDKLRINRFPWPKVLKISYKRSSFFIKIRPGEQEQYESTIGFKLPSYRAAKKLWKVCVEHHTFFRLTSTDTIPKSKFLALGSKFRYSGRTQAQTRQASALIDRPAPHFERTASKRASRSLDGAAAVDSADRSPRPTSAPAITQGQVAEGGVLDASAKKTVVPKAQKETVKAEVKKEDEPPEQAEPEPTEAWKVEKTHIEVTVPTSNGDQTQKLAEKTEDLIRMRKKKRERLDGENIYIRHSNLMLEDLDKSQEEIKKHHASISELKKNFMESVPEPRPSEWDKRLSTHSPFRTLNINGQIPTGEGPPLVKTQTVTISDNANAVKSEIPTKDVPIVHTETKTITYEAAQTDDNSGDLDPGVLLTAQTITSETPSSTTTTQITKTVKGGISETRIEKRIVITGDADIDHDQVLVQAIKEAKEQHPDMSVTKVVVHQETEIADE

SEQ ID NO: 2 - protein, 426 aa, Homo sapiens
MPLLWLRGFLLASCWIIVRSSPTPGSEGHSAAPDCPSCALAALPKDVPNSQPEMVEAVKKHILNMLHLKKRPDVTQPVPKAALLNAIRKLHVGKVGENGYVEIEDDIGRRAEMNELMEQTSEIITFAESGTARKTLHFEISKEGSDLSVVERAEVWLFLKVPKANRTRTKVTIRLFQQQKHPQGSLDTGEEAEEVGLKGERSELLLSEKVVDARKSTWHVFPVSSSIQRLLDQGKSSLDVRIACEQCQESGASLVLLGKKKKKEEEGEGKKKGGGEGGAGADEEKEQSHRPFLMLQARQSEDHPHRRRRRGLECDGKVNICCKKQFFVSFKDIGWNDWIIAPSGYHANYCEGECPSHIAGTSGSSLSFHSTVINHYRMRGHSPFANLKSCCVPTKLRPMSMLYYDDGQNIIKKDIQNMIVEECGCS

SEQ ID NO: 3 - protein, 819 aa, Homo sapiens
MGSGARFPSGTLRVRWLLLLGLVGPVLGAARPGFQQTSHLSSYEIITPWRLTRERREAPRPYSKQVSYVIQAEGKEHIIHLERNKDLLPEDFVVYTYNKEGTLITDHPNIQNHCHYRGYVEGVHNSSIALSDCFGLRGLLHLENASYGIEPLQNSSHFEHIIYRMDDVYKEPLKCGVSNKDIEKETAKDEEEEPPSMTQLLRRRRAVLPQTRYVELFIVVDKERYDMMGRNQTAVREEMILLANYLDSMYIMLNIRIVLVGLEIWTNGNLINIVGGAGDVLGNFVQWREKFLITRRRHDSAQLVLKKGFGGTAGMAFVGTVCSRSHAGGINVFGQITVETFASIVAHELGHNLGMNHDDGRDCSCGAKSCIMNSGASGSRNFSSCSAEDFEKLTLNKGGNCLLNIPKPDEAYSAPSCGNKLVDAGEECDCGTPKECELDPCCEGSTCKLKSFAECAYGDCCKDCRFLPGGTLCRGKTSECDVPEYCNGSSQFCQPDVFIQNGYPCQNNKAYCYNGMCQYYDAQCQVIFGSKAKAAPKDCFIEVNSKGDRFGNCGFSGNEYKKCATGNALCGKLQCENVQEIPVFGIVPAIIQTPSRGTKCWGVDFQLGSDVPDPGMVNEGTKCGAGKICRNFQCVDASVLNYDCDVQKKCHGHGVCNSNKNCHCENGWAPPNCETKGYGGSVDSGPTYNEMNTALRDGLLVFFFLIVPLIVCAIFIFIKRDQLWRSYFRKKRSQTYESDGKNQANPSRQPGSVPRHVSPVTPPREVPIYANRFAVPTYAAKQPQQFPSRPPPPQPKVSSQGNLIPARPAPAPPLYSSLT

SEQ ID NO: 4 - protein, 909 aa, Homo sapiens
MAARPLPVSPARALLLALAGALLAPCEARGVSLWNQGRADEVVSASVGSGDLWIPVKSFDSKNHPEVLNIRLQRESKELIINLERNEGLIASSFTETHYLQDGTDVSLARNYTVILGHCYYHGHVRGYSDSAVSLSTCSGLRGLIVFENESYVLEPMKSATNRYKLFPAKKLKSVRGSCGSHHNTPNLAAKNVFPPPSQTWARRHKRETLKATKYVELVIVADNREFQRQGKDLEKVKQRLIEIANHVDKFYRPLNIRIVLVGVEVWNDMDKCSVSQDPFTSLHEFLDWRKMKLLPRKSHDNAQLVSGVYFQGTTIGMAPIMSMCTADQSGGIVMDHSDNPLGAAVTLAHELGHNFGMNHDTLDRGCSCQMAVEKGGCIMNASTGYPFPMVFSSCSRKDLETSLEKGMGVCLFNLPEVRESFGGQKCGNRFVEEGEECDCGEPEECMNRCCNATTCTLKPDAVCAHGLCCEDCQLKPAGTACRDSSNSCDLPEFCTGASPHCPANVYLHDGHSCQDVDGYCYNGICQTHEQQCVTLWGPGAKPAPGICFERVNSAGDPYGNCGKVSKSSFAKCEMRDAKCGKIQCQGGASRPVIGTNAVSIETNIPLQQGGRILCRGTHVYLGDDMPDPGLVLAGTKCADGKICLNRQCQNISVFGVHECAMQCHGRGVCNNRKNCHCEAHWAPPFCDKFGFGGSTDSGPIRQADNQGLTIGILVTILCLLAAGFVVYLKRKTLIRLLFTNKKTTIEKLRCVRPSRPPRGFQPCQAHLGHLGKGLMRKPPDSYPPKDNPRRLLQCQNVDISRPLNGLNVPQPQSTQRVLPPLHRAPRAPSVPARPLPAKPALRQAQGTCKPNPPQKPLPADPLARTTRLTHALARTPGQWETGLRLAPLRPAPQYPHQVPRSTHTAYIK

SEQ ID NO: 5 - protein, 359 aa, Homo sapiens
MLSAASRVVSRAAVHCALRSPPPEARALAMSRPPPPRVASVLGTMEMGRRMDAPASAAAVRAFLERGHTELDTAFMYSDGQSETILGGLGLGLGGGDCRVKIATKANPWDGKSLKPDSVRSQLETSLKRLQCPQVDLFYLHAPDHGTPVEETLHACQRLHQEGKFVELGLSNYASWEVAEICTLCKSNGWILPTVYQGMYNATTRQVETELFPCLRHFGLRFYAYNPLAGGLLTGKYKYEDKDGKQPVGRFFGNSWAETYRNRFWKEHHFEAIALVEKALQAAYGASAPSVTSAALRWMYHHSQLQGAHGDAVILGMSSLEQLEQNLAATEEGPLEPAVVDAFNQAWHLVAHECPNYFR

SEQ ID NO: 6 - protein, 583 aa, Homo sapiens
MESKGASSCRLLFCLLISATVFRPGLGWYTVNSAYGDTIIIPCRLDVPQNLMFGKWKYEKPDGSPVFIAFRSSTKKSVQYDDVPEYKDRLNLSENYTLSISNARISDEKRFVCMLVTEDNVFEAPTIVKVFKQPSKPEIVSKALFLETEQLKKLGDCISEDSYPDGNITWYRNGKVLHPLEGAVVIIFKKEMDPVTQLYTMTSTLEYKTTKADIQMPFTCSVTYYGPSGQKTIHSEQAVFDIYYPTEQVTIQVLPPKNAIKEGDNITLKCLGNGNPPPEEFLFYLPGQPEGIRSSNTYTLTDVRRNATGDYKCSLIDKKSMIASTAITVHYLDLSLNPSGEVTRQIGDALPVSCTISASRNATVVWMKDNIRLRSSPSFSSLHYQDAGNYVCETALQEVEGLKKRESLTLIVEGKPQIKMTKKTDPSGLSKTIICHVEGFPKPAIQWTITGSGSVINQTEESPYINGRYYSKIIISPEENVTLTCTAENQLERTVNSLNVSAISIPEHDEADEISDENREKVNDQAKLIVGIVVGLLLAALVAGVVYWLYMKKSKTASKHVNKDLGNMEENKKLEENNHKTEA

SEQ ID NO: 7 - protein, 408 aa, Homo sapiens
MTSKGPEEEHPSVTLFRQYLRIRTVQPKPDYGAAVAFFEETARQLGLGCQKVEVAPGYVVTVLTWPGTNPTLSSILLNSHTDVVPVFKEHWSHDPFEAFKDSEGYIYARGAQDMKCVSIQYLEAVRRLKVEGHRFPRTIHMTFVPDEEVGGHQGMELFVQRPEFHALRAGFALDEGIANPTDAFTVFYSERSPWWVRVTSTGRPGHASRFMEDTAAEKLHKVVNSILAFREKEWQRLQSNPHLKEGSVTSVNLTKLEGGVAYNVIPATMSASFDFRVAPDVDFKAFEEQLQSWCQAAGEGVTLEFAQKWMHPQVTPTDDSNPWWAAFSRVCKDMNLTLEPEIMPAATDNRYIRAVGVPALGFSPMNRTPVLLHDHDERLHEAVFLRGVDIYTRLLPALASVPALPSDS

SEQ ID NO: 8 - protein, 147 aa, Homo sapiens
MVMGLGVLLLVFVLGLGLTPPTLAQDNSRYTHFLTQHYDAKPQGRDDRYCESIMRRRGLTSPCKDINTFIHGNKRSIKAICENKNGNPHRENLRISKSSFQVTTCKLHGGSPWPPCQYRATAGFRNVVVACENGLPVHLDQSIFRRP

SEQ ID NO: 9 - protein, 498 aa, Homo sapiens
MTVFLSFAFLAAILTHIGCSNQRRSPENSGRRYNRIQHGQCAYTFILPEHDGNCRESTTDQYNTNALQRDAPHVEPDFSSQKLQHLEHVMENYTQWLQKLENYIVENMKSEMAQIQQNAVQNHTATMLEIGTSLLSQTAEQTRKLTDVETQVLNQTSRLEIQLLENSLSTYKLEKQLLQQTNEILKIHEKNSLLEHKILEMEGKHKEELDTLKEEKENLQGLVTRQTYIIQELEKQLNRATTNNSVLQKQQLELMDTVHNLVNLCTKEGVLLKGGKREEEKPFRDCADVYQAGFNKSGIYTIYINNMPEPKKVFCNMDVNGGGWTVIQHREDGSLDFQRGWKEYKMGFGNPSGEYWLGNEFIFAITSQRQYMLRIELMDWEGNRAYSQYDRFHIGNEKQNYRLYLKGHTGTAGKQSSLILHGADFSTKDADNDNCMCKCALMLTGGWWFDACGPSNLNGMFYTAGQNHGKLNGIKWHYFKGPSYSLRSTTMMIRPLDF

SEQ ID NO: 10 - protein, 496 aa, Homo sapiens
MWQIVFFTLSCDLVLAAAYNNFRKSMDSIGKKQYQVQHGSCSYTFLLPEMDNCRSSSSPYVSNAVQRDAPLEYDDSVQRLQVLENIMENNTQWLMKLENYIQDNMKKEMVEIQQNAVQNQTAVMIEIGTNLLNQTAEQTRKLTDVEAQVLNQTTRLELQLLEHSLSTNKLEKQILDQTSEINKLQDKNSFLEKKVLAMEDKHIIQLQSIKEEKDQLQVLVSKQNSIIEELEKKIVTATVNNSVLQKQQHDLMETVNNLLTMMSTSNSAKDPTVAKEEQISFRDCAEVFKSGHTTNGIYTLTFPNSTEEIKAYCDMEAGGGGWTIIQRREDGSVDFQRTWKEYKVGFGNPSGEYWLGNEFVSQLTNQQRYVLKIHLKDWEGNEAYSLYEHFYLSSEELNYRIHLKGLTGTAGKISSISQPGNDFSTKDGDNDKCICKCSQMLTGGWWFDACGPSNLNGMYYPQRQNTNKFNGIKWYYWKGSGYSLKATTMMIRPADF

SEQ ID NO: 11 - protein, 810 aa, Homo sapiens
MEHKEVVLLLLLFLKSGQGEPLDDYVNTQGASLFSVTKKQLGAGSIEECAAKCEEDEEFTCRAFQYHSKEQQCVIMAENRKSSIIIRMRDVVLFEKKVYLSECKTGNGKNYRGTMSKTKNGITCQKWSSTSPHRPRFSPATHPSEGLEENYCRNPDNDPQGPWCYTTDPEKRYDYCDILECEEECMHCSGENYDGKISKTMSGLECQAWDSQSPHAHGYIPSKFPNKNLKKNYCRNPDRELRPWCFTTDPNKRWELCDIPRCTTPPPSSGPTYQCLKGTGENYRGNVAVTVSGHTCQHWSAQTPHTHNRTPENFPCKNLDENYCRNPDGKRAPWCHTTNSQVRWEYCKIPSCDSSPVSTEQLAPTAPPELTPVVQDCYHGDGQSYRGTSSTTTTGKKCQSWSSMTPHRHQKTPENYPNAGLTMNYCRNPDADKGPWCFTTDPSVRWEYCNLKKCSGTEASVVAPPPVVLLPDVETPSEEDCMFGNGKGYRGKRATTVTGTPCQDWAAQEPHRHSIFTPETNPRAGLEKNYCRNPDGDVGGPWCYTTNPRKLYDYCDVPQCAAPSFDCGKPQVEPKKCPGRVVGGCVAHPHSWPWQVSLRTRFGMHFCGGTLISPEWVLTAAHCLEKSPRPSSYKVILGAHQEVNLEPHVQEIEVSRLFLEPTRKDIALLKLSSPAVITDKVIPACLPSPNYVVADRTECFITGWGETQGTFGAGLLKEAQLPVIENKVCNRYEFLNGRVQSTELCAGHLAGGTDSCQGDSGGPLVCFEKDKYILQGVTSWGLGCARPNKPGVYVRVSRFVTWIEGVMRNN

SEQ ID NO: 12 - protein, 406 aa, Homo sapiens
MSGAPTAGAALMLCAATAVLLSAQGGPVQSKSPRFASWDEMNVLAHGLLQLGQGLREHAERTRSQLSALERRLSACGSACQGTEGSTDLPLAPESRVDPEVLHSLQTQLKAQNSRIQQLFHKVAQQQRHLEKQHLRIQHLQSQFGLLDHKHLDHEVAKPARRKRLPEMAQPVDPAHNVSRLHRLPRDCQELFQVGERQSGLFEIQPQGSPPFLVNCKMTSDGGWTVIQRRHDGSVDFNRPWEAYKAGFGDPHGEFWLGLEKVHSITGDRNSRLAVQLRDWDGNAELLQFSVHLGGEDTAYSLQLTAPVAGQLGATTVPPSGLSVPFSTWDQDHDLRRDKNCAKSLSGGWWFGTCSHSNLNGQYFRSIPQQRQKLKKGIFWKTWRGRYYPLQATTMLIQPMAAEAAS

SEQ ID NO: 13 - protein, 346 aa, Homo sapiens
MAMVSEFLKQAWFIENEEQEYVQTVKSSKGGPGSAVSPYPTFNPSSDVAALHKAIMVKGVDEATIIDILTKRNNAQRQQIKAAYLQETGKPLDETLKKALTGHLEEVVLALLKTPAQFDADELRAAMKGLGTDEDTLIEILASRTNKEIRDINRVYREELKRDLAKDITSDTSGDFRNALLSLAKGDRSEDFGVNEDLADSDARALYEAGERRKGTDVNVFNTILTTRSYPQLRRVFQKYTKYSKHDMNKVLDLELKGDIEKCLTAIVKCATSKPAFFAEKLHQAMKGVGTRHKALIRIMVSRSEIDMNDIKAFYQKMYGISLCQAILDETKGDYEKILVALCGGN

SEQ ID NO: 14 - protein, 189 aa, Homo sapiens
MVMLLLLLSALAGLFGAAEGQAFHLGKCPNPPVQENFDVNKYLGRWYEIEKIPTTFENGRCIQANYSLMENGKIKVLNQELRADGTVNQIEGEATPVNLTEPAKLEVKFSWFMPSAPYWILATDYENYALVYSCTCIIQLFHVDFAWILARNPNLPPETVDSLKNILTSNNIDVKKMTVTDQVNCPKLS

SEQ ID NO: 15 - protein, 317 aa, Homo sapiens [sequence omitted]

SEQ ID NO: 16 - protein, 317 aa, Homo sapiens [sequence omitted]

SEQ ID NO: 17 - protein, 252 aa, Homo sapiens
MRAPLLPPAPVVLSLLILGSGHYAAGLDLNDTYSGKREPFSGDHSADGFEVTSRSEMSSGSEISPVSEMPSSSEPSSGADYDYSEEYDNEPQIPGYIVDDSVRVEQVVKPPQNKTESENTSDKPKRKKKGGKNGKNRRNRKKKNPCNAEFQNFCIHGECKYIEHLEAVTCKCQQEYFGERCGEKSMKTHSMIDSSLSKIALAAIAAFMSAVILTAVAVITVQLRRQYVRKYEGEAEERKKLRQENGNVHAIA

SEQ ID NO: 18 - protein, 132 aa, Homo sapiens
MLTAAVLSCALLLALPATRGAQMGLAPMEGIRRPDQALLPELPGLGLRAPLKKTTAEQAEEDLLQEAQALAEVLDLQDREPRSSRRCVRLHESCLGQQVPCCDPCATCYCRFFNAFCYCRKLGTAMNPCSRT

SEQ ID NO: 19 - protein, 941 aa, Homo sapiens
MVFLPLKWSLATMSFLLSSLLALLTVSTPSWCQSTEASPKRSDGTPFPWNKIRLPEYVIPVHYDLLIHANLTTLTFWGTTKVEITASQPTSTIILHSHHLQISRATLRKGAGERLSEEPLQVLEHPRQEQIALLAPEPLLVGLPYTVVIHYAGNLSETFHGFYKSTYRTKEGELRILASTQFEPTAARMAFPCFDEPAFKASFSIKIRREPRHLAISNMPLVKSVTVAEGLIEDHFDVTVKMSTYLVAFIISDFESVSKITKSGVKVSVYAVPDKINQADYALDAAVTLLEFYEDYFSIPYPLPKQDLAAIPDFQSGAMENWGLTTYRESALLFDAEKSSASSKLGITMTVAHELAHQWFGNLVTMEWWNDLWLNEGFAKFMEFVSVSVTHPELKVGDYFFGKCFDAMEVDALNSSHPVSTPVENPAQIREMFDDVSYDKGACILNMLREYLSADAFKSGIVQYLQKHSYKNTKNEDLWDSMASICPTDGVKGMDGFCSRSQHSSSSSHWHQEGVDVKTMMNTWTLQKGFPLITITVRGRNVHMKQEHYMKGSDGAPDTGYLWHVPLTFITSKSDMVHRFLLKTKTDVLILPEEVEWIKFNVGMNGYYIVHYEDDGWDSLTGLLKGTHTAVSSNDRASLINNAFQLVSIGKLSIEKALDLSLYLKHETEIMPVFQGLNELIPMYKLMEKRDMNEVETQFKAFLIRLLRDLIDKQTWTDEGSVSERMLRSQLLLLACVHNYQPCVQRAEGYFRKWKESNGNLSLPVDVTLAVFAVGAQSTEGWDFLYSKYQFSLSSTEKSQIEFALCRTQNKEKLQWLLDESFKGDKIKTQEFPQILTLIGRNPVGYPLAWQFLRKNWNKLVQKFELGSSSIAHMVMGTTNQFSTRTRLEEVKGFFSSLKENGSQLRCVQQTIETIEENIGWMDKNFDKIRVWLQSEKLERM

SEQ ID NO: 20 - protein, 453 aa, Homo sapiens
MALVRALVCCLLTAWHCRSGLGLPVAPAGGRNPPPAIGQFWHVTDLHLDPTYHITDDHTKVCASSKGANASNPGPFGDVLCDSPYQLILSAFDFIKNSGQEASFMIWTGDSPPHVPVPELSTDTVINVITNMTTTIQSLFPNLQVFPALGNHDYWPQDQLPVVTSKVYNAVANLWKPWLDEEAISTLRKGGFYSQKVTTNPNLRIISLNTNLYYGPNIMTLNKTDPANQFEWLESTLNNSQQNKEKVYIIAHVPVGYLPSSQNITAMREYYNEKLIDIFQKYSDVIAGQFYGHTHRDSIMVLSDKKGSPVNSLFVAPAVTPVKSVLEKQTNNPGIRLFQYDPRDYKLLDMLQYYLNLTEANLKGESIWKLEYILTQTYDIEDLQPESLYGLAKQFTILDSKQFIKYYNYFFVSYDSSVTCDKTCKAFQICAIMNLDNISYADCLKQLYIKHNY

SEQ ID NO: 21 - protein, 967 aa, Homo sapiens
MQRAVPEGFGRRKLGSDMGNAERAPGSRSFGPVPTLLLLAAALLAVSDALGRPSEEDEELVVPELERAPGHGTTRLRLHAFDQQLDLELRPDSSFLAPGFTLQNVGRKSGSETPLPETDLAHCFYSGTVNGDPSSAAALSLCEGVRGAFYLLGEAYFIQPLPAASERLATAAPGEKPPAPLQFHLLRRNRQGDVGGTCGVVDDEPRPTGKAETEDEDEGTEGEDEGAQWSPQDPALQGVGQPTGTGSIRKKRFVSSHRYVETMLVADQSMAEFHGSGLKHYLLTLFSVAARLYKHPSIRNSVSLVVVKILVIHDEQKGPEVTSNAALTLRNFCNWQKQHNPPSDRDAEHYDTAILFTRQDLCGSQTCDTLGMADVGTVCDPSRSCSVIEDDGLQAAFTTAHELGHVFNMPHDDAKQCASLNGVNQDSHMMASMLSNLDHSQPWSPCSAYMITSFLDNGHGECLMDKPQNPIQLPGDLPGTSYDANRQCQFTFGEDSKHCPDAASTCSTLWCTGTSGGVLVCQTKHFPWADGTSCGEGKWCINGKCVNKTDRKHFDTPFHGSWGMWGPWGDCSRTCGGGVQYTMRECDNPVPKNGGKYCEGKRVRYRSCNLEDCPDNNGKTFREEQCEAHNEFSKASFGSGPAVEWIPKYAGVSPKDRCKLICQAKGIGYFFVLQPKVVDGTPCSPDSTSVCVQGQCVKAGCDRIIDSKKKFDKCGVCGGNGSTCKKISGSVTSAKPGYHDIITIPTGATNIEVKQRNQRGSRNNGSFLAIKAADGTYILNGDYTLSTLEQDIMYKGVVLRYSGSSAALERIRSFSPLKEPLTIQVLTVGNALRPKIKYTYFVKKKKESFNAIPTFSAWVIEEWGECSKSCELGWQRRLVECRDINGQPASECAKEVKPASTRPCADHPCPQWQLGEWSSCSKTCGKGYKKRSLKCLSHDGGVLSHESCDPLKKPKHFIDFCTMAECS

SEQ ID NO: 22 - protein, 290 aa, Homo sapiens
MRIFAVFIFMTYWHLLNAFTVTVPKDLYVVEYGSNMTIECKFPVEKQLDLAALIVYWEMEDKNIIQFVHGEEDLKVQHSSYRQRARLLKDQLSLGNAALQITDVKLQDAGVYRCMISYGGADYKRITVKVNAPYNKINQRILVVDPVTSEHELTCQAEGYPKAEVIWTSSDHQVLSGKTTTTNSKREEKLFNVTSTLRINTTTNEIFYCTFRRLDPEENHTAELVIPELPLAHPPNERTHLVILGAILLCLGVALTFIFRLRKGRMMDVKKCGIQDTNSKKQSDTHLEET

SEQ ID NO: 23 - protein, 385 aa, Homo sapiens
MAAALFVLLGFALLGTHGASGAAGFVQAPLSQQRWVGGSVELHCEAVGSPVPEIQWWFEGQGPNDTCSQLWDGARLDRVHIHATYHQHAASTISIDTLVEEDTGTYECRASNDPDRNHLTRAPRVKWVRAQAVVLVLEPGTVFTTVEDLGSKILLTCSLNDSATEVTGHRWLKGGVVLKEDALPGQKTEFKVDSDDQWGEYSCVFLPEPMGTANIQLHGPPRVKAVKSSEHINEGETAMLVCKSESVPPVTDWAWYKITDSEDKALMNGSESRFFVSSSQGRSELHIENLNMEADPGQYRCNGTSSKGSDQAIITLRVRSHLAALWPFLGIVAEVLVLVTIIFIYEKRRKPEDVLDDDDAGSAPLKSSGQHQNDKGKNVRQRNSS

SEQ ID NO: 24 - protein, 175 aa, Homo sapiens
MTDCEFGYIYRLAQDYLQCVLQIPQPGSGPSKTSRVLQNVAFSVQKEVEKNLKSCLDNVNVVSVDTARTLFNQVMEKEFEDGIINWGRIVTIFAFEGILIKKLLRQQIAPDVDTYKEISYFVAEFIMNNTGEWIRQNGGWENGFVKKFEPKSGWMTFLEVTGKICEMLSLLKQYC

SEQ ID NO: 25 - protein, 683 aa, Homo sapiens
MALFVRLLALALALALGPAATLAGPAKSPYQLVLQHSRLRGRQHGPNVCAVQKVIGTNRKYFTNCKQWYQRKICGKSTVISYECCPGYEKVPGEKGCPAALPLSNLYETLGVVGSTTTQLYTDRTEKLRPEMEGPGSFTIFAPSNEAWASLPAEVLDSLVSNVNIELLNALRYHMVGRRVLTDELKHGMTLTSMYQNSNIQIHHYPNGIVTVNCARLLKADHHATNGVVHLIDKVISTITNNIQQIIEIEDTFETLRAAVAASGLNTMLEGNGQYTLLAPTNEAFEKIPSETLNRILGDPEALRDLLNNHILKSAMCAEAIVAGLSVETLEGTTLEVGCSGDMLTINGKAIISNKDILATNGVIHYIDELLIPDSAKTLFELAAESDVSTAIDLFRQAGLGNHLSGSERLTLLAPLNSVFKDGTPPIDAHTRNLLRNHIIKDQLASKYLYHGQTLETLGGKKLRVFVYRNSLCIENSCIAAHDKRGRYGTLFTMDRVLTPPMGTVMDVLKGDNRFSMLVAAIQSAGLTETLNREGVYTVFAPTNEAFRALPPRERSRLLGDAKELANILKYHIGDEILVSGGIGALVRLKSLQGDKLEVSLKNNVVSVNKEPVAEPDIMATNGVVHVITNVLQPPANRPQERGDELADSALEIFKQASAFSRASQRSVRLAPVYQKLLERMKH

SEQ ID NO: 26 - protein, 368 aa, Homo sapiens
MWPLWRLVSLLALSQALPFEQRGFWDFTLDDGPFMMNDEEASGADTSGVLDPDSVTPTYSAMCPFGCHCHLRVVQCSDLGLKSVPKEISPDTTLLDLQNNDISELRKDDFKGLQHLYALVLVNNKISKIHEKAFSPLRKLQKLYISKNHLVEIPPNLPSSLVELRIHDNRIRKVPKGVFSGLRNMNCIEMGGNPLENSGFEPGAFDGLKLNYLRISEAKLTGIPKDLPETLNELHLDHNKIQAIELEDLLRYSKLYRLGLGHNQIRMIENGSLSFLPTLRELHLDNNKLARVPSGLPDLKLLQVVYLHSNNITKVGVNDFCPMGFGVKRAYYNGISLFNNPVPYWEVQPATFRCVTDRLAIQFGNYKK

SEQ ID NO: 27 - protein, 359 aa, Homo sapiens
MKATIILLLLAQVSWAGPFQQRGLFDFMLEDEASGIGPEVPDDRDFEPSLGPVCPFRCQCHLRVVQCSDLGLDKVPKDLPPDTTLLDLQNNKITEIKDGDFKNLKNLHALILVNNKISKVSPGAFTPLVKLERLYLSKNQLKELPEKMPKTLQELRAHENEITKVRKVTFNGLNQMIVIELGTNPLKSSGIENGAFQGMKKLSYIRIADTNITSIPQGLPPSLTELHLDGNKISRVDAASLKGLNNLAKLGLSFNSISAVDNGSLANTPHLRELHLDNNKLTRVPGGLAEHKYIQVVYLHNNNISVVGSSDFCPPGHNTKKASYSGVSLFSNPVQYWEIQPSTFRCVYVRSAIQLGNYK

SEQ ID NO: 28 - protein, 317 aa, Homo sapiens
MVVSGAPPALGGGCLGTFTSLLLLASTAILNAARIPVPPACGKPQQLNRVVGGEDSTDSEWPWIVSIQKNGTHHCAGSLLTSRWVITAAHCFKDNLNKPYLFSVLLGAWQLGNPGSRSQKVGVAWVEPHPVYSWKEGACADIALVRLERSIQFSERVLPICLPDASIHLPPNTHCWISGWGSIQDGVPLPHPQTLQKLKVPIIDSEVCSHLYWRGAGQGPITEDMLCAGYLEGERDACLGDSGGPLMCQVDGAWLLAGIISWGEGCAERNRPGVYISLSAHRSWVEKIVQGVQLRGRAQGGGALRAPSQGSGAAARS

SEQ ID NO: 29 - protein, 705 aa, Homo sapiens
MWLLYLLVPALFCRAGGSIPIPQKLFGEVTSPLFPKPYPNNFETTTVITVPTGYRVKLVFQQFDLEPSEGCFYDYVKISADKKSLGRFCGQLGSPLGNPPGKKEFMSQGNKMLLTFHTDFSNEENGTIMFYKGFLAYYQAVDLDECASRSKSGEEDPQPQCQHLCHNYVGGYFCSCRPGYELQEDTHSCQAECSSELYTEASGYISSLEYPRSYPPDLRCNYSIRVERGLTLHLKFLEPFDIDDHQQVHCPYDQLQIYANGKNIGEFCGKQRPPDLDTSSNAVDLLFFTDESGDSRGWKLRYTTEIIKCPQPKTLDEFTIIQNLQPQYQFRDYFIATCKQGYQLIEGNQVLHSFTAVCQDDGTWHRAMPRCKIKDCGQPRNLPNGDFRYTTTMGVNTYKARIQYYCHEPYYKMQTRAGSRESEQGVYTCTAQGIWKNEQKGEKIPRCLPVCGKPVNPVEQRQRIIGGQKAKMGNFPWQVFTNIHGRGGGALLGDRWILTAAHTLYPKEHEAQSNASLDVFLGHTNVEELMKLGNHPIRRVSVHPDYRQDESYNFEGDIALLELENSVTLGPNLLPICLPDNDTFYDLGLMGYVSGFGVMEEKIAHDLRFVRLPVANPQACENWLRGKNRMDVFSQNMFCAGHPSLKQDACQGDSGGVFAVRDPNTDRWVATGIVSWGIGCSRGYGFYTKVLNYVDWIKKEMEEED

SEQ ID NO: 30 - protein, 906 aa, Homo sapiens
MCRIAGALRTLLPLLAALLQASVEASGEIALCKTGFPEDVYSAVLSKDVHEGQPLLNVKFSNCNGKRKVQYESSEPADFKVDEDGMVYAVRSFPLSSEHAKFLIYAQDKETQEKWQVAVKLSLKPTLTEESVKESAEVEEIVFPRQFSKHSGHLQRQKRDWVIPPINLPENSRGPFPQELVRIRSDRDKNLSLRYSVTGPGADQPPTGIFIINPISGQLSVTKPLDREQIARFHLRAHAVDINGNQVENPIDIVINVIDMNDNRPEFLHQVWNGTVPEGSKPGTYVMTVTAIDADDPNALNGMLRYRIVSQAPSTPSPNMFTINNETGDIITVAAGLDREKVQQYTLIIQATDMEGNPTYGLSNTATAVITVTDVNDNPPEFTAMTFYGEVPENRVDIIVANLTVTDKDQPHTPAWNAVYRISGGDPTGRFAIQTDPNSNDGLVTVVKPIDFETNRMFVLTVAAENQVPLAKGIQHPPQSTATVSVTVIDVNENPYFAPNPKIIRQEEGLHAGTMLTTFTAQDPDRYMQQNIRYTKLSDPANWLKIDPVNGQITTIAVLDRESPNVKNNIYNATFLASDNGIPPMSGTGTLQIYLLDINDNAPQVLPQEAETCETPDPNSINITALDYDIDPNAGPFAFDLPLSPVTIKRNWTITRLNGDFAQLNLKIKFLEAGIYEVPIIITDSGNPPKSNISILRVKVCQCDSNGDCTDVDRIVGAGLGTGAIIAILLCIIILLILVLMFVVWMKRRDKERQAKQLLIDPEDDVRDNILKYDEEGGGEEDQDYDLSQLQQPDTVEPDAIKPVGIRRMDERPIHAEPQYPVRSAAPHPGDIGDFINEGLKAADNDPTAPPYDSLLVFDYEGSGSTAGSLSSLNSSSSGGEQDYDYLNDWGPRFKKLADMYGGGDD

SEQ ID NO: 31 - protein, 114 aa, Homo sapiens
MTCKMSQLERNIETIINTFHQYSVKLGHPDTLNQGEFKELVRKDLQNFLKKENKNEKVIEHIMEDLDTNADKQLSFEEFIMLMARLTWASHEKMHEGDEGPGHHHKPGLGEGTP

SEQ ID NO: 32 - protein, 348 aa, Homo sapiens
MYTAIPQSGSPFPGSVQDPGLHVWRVEKLKPVPVAQENQGVFFSGDSYLVLHNGPEEVSHLHLWIGQQSSRDEQGACAVLAVHLNTLLGERPVQHREVQGNESDLFMSYFPRGLKYQEGGVESAFHKTSTGAPAAIKKLYQVKGKKNIRATERALNWDSFNTGDCFILDLGQNIFAWCGGKSNILERNKARDLALAIRDSERQGKAQVEIVTDGEEPAEMIQVLGPKPALKEGNPEEDLTADKANAQAAALYKVSDATGQMNLTKVADSSPFALELLISDDCFVLDNGLCGKIYIWKGRKANEKERQAALQVAEGFISRMQYAPNTQVEILPQGHESPIFKQFFKDWK

SEQ ID NO: 33 - protein, 308 aa, Homo sapiens
MRALVLLLSLFLLGGQAQHVSDWTYSEGALDEAHWPQHYPACGGQRQSPINLQRTKVRYNPSLKGLNMTGYETQAGEFPMVNNGHTVQISLPSTMRMTVADGTVYIAQQMHFHWGGASSEISGSEHTVDGIRHVIEIHIVHYNSKYKSYDIAQDAPDGLAVLAAFVEVKNYPENTYYSNFISHLANIKYPGQRTTLTGLDVQDMLPRNLQHYYTYHGSLTTPPCTENVHWFVLADFVKLSRTQVWKLENSLLDHRNKTIHNDYRRTQPLNHRVVESNFPNQEYTLGSEFQFYLHKIEEILDYLRRALN

SEQ ID NO: 34 - protein, 277 aa, Homo sapiens
MENTENSVDSKSIKNLEPKIIHGSESMDSGISLDNSYKMDYPEMGLCIIINNKNFHKSTGMTSRSGTDVDAANLRETFRNLKYEVRNKNDLTREEIVELMRDVSKEDHSKRSSFVCVLLSHGEEGIIFGTNGPVDLKKITNFFRGDRCRSLTGKPKLFIIQACRGTELDCGIETDSGVDDDMACHKIPVEADFLYAYSTAPGYYSWRNSKDGSWFIQSLCAMLKQYADKLEFMHILTRVNRKVATEFESFSFDATFHAKKQIPCIVSMLTKELYFYH

SEQ ID NO: 35 - protein, 480 aa, Homo sapiens
MIRAAPPPLFLLLLLLLLLVSWASRGEAAPDQDEIQRLPGLAKQPSFRQYSGYLKGSGSKHLHYWFVESQKDPENSPVVLWLNGGPGCSSLDGLLTEHGPFLVQPDGVTLEYNPYSWNLIANVLYLESPAGVGFSYSDDKFYATNDTEVAQSNFEALQDFFRLFPEYKNNKLFLTGESYAGIYIPTLAVLVMQDPSMNLQGLAVGNGLSSYEQNDNSLVYFAYYHGLLGNRLWSSLQTHCCSQNKCNFYDNKDLECVTNLQEVARIVGNSGLNIYNLYAPCAGGVPSHFRYEKDTVVVQDLGNIFTRLPLKRMWHQALLRSGDKVRMDPPCTNTTAASTYLNNPYVRKALNIPEQLPQWDMCNFLVNLQYRRLYRSMNSQYLKLLSSQKYQILLYNGDVDMACNFMGDEWFVDSLNQKMEVQRRPWLVKYGDSGEQIAGFVKEFSHIAFLTIKGAGHMVPTDKPLAAFTMFSRFLNKQPY

SEQ ID NO: 36 - protein, 335 aa, Homo sapiens
MWATLPLLCAGAWLLGVPVCGAAELCVNSLEKFHFKSWMSKHRKTYSTEEYHHRLQTFASNWRKINAHNNGNHTFKMALNQFSDMSFAEIKHKYLWSEPQNCSATKSNYLRGTGPYPPSVDWRKKGNFVSPVKNQGACGSCWTFSTTGALESAIAIATGKMLSLAEQQLVDCAQDFNNHGCQGGLPSQAFEYILYNKGIMGEDTYPYQGKDGYCKFQPGKAIGFVKDVANITIYDEEAMVEAVALYNPVSFAFEVTQDFMMYRTGIYSSTSCHKTPDKVNHAVLAVGYGEKNGIPYWIVKNSWGPQWGMNGYFLIERGKNMCGLAACASYPIPLV

SEQ ID NO: 37 - protein, 331 aa, Homo sapiens
MKRLVCVLLVCSSAVAQLHKDPTLDHHWHLWKKTYGKQYKEKNEEAVRRLIWEKNLKFVMLHNLEHSMGMHSYDLGMNHLGDMTSEEVMSLMSSLRVPSQWQRNITYKSNPNRILPDSVDWREKGCVTEVKYQGSCGACWAFSAVGALEAQLKLKTGKLVSLSAQNLVDCSTEKYGNKGCNGGFMTTAFQYIIDNKGIDSDASYPYKAMDQKCQYDSKYRAATCSKYTELPYGREDVLKEAVANKGPVSVGVDARHPSFFLYRSGVYYEPSCTQNVNHGVLVVGYGDLNGKEYWLVKNSWGHNFGEEGYIRMARNKGNHCGIASFPSYPEI

SEQ ID NO: 38 - protein, 334 aa, Homo sapiens
MNLSLVLAAFCLGIASAVPKFDQNLDTKWYQWKATHRRLYGANEEGWRRAVWEKNMKMIELHNGEYSQGKHGFTMAMNAFGDMTNEEFRQMMGCFRNQKFRKGKVFREPLFLDLPKSVDWRKKGYVTPVKNQKQCGSCWAFSATGALEGQMFRKTGKLVSLSEQNLVDCSRPQGNQGCNGGFMARAFQYVKENGGLDSEESYPYVAVDEICKYRPENSVANDTGFTVVAPGKEKALMKAVATVGPISVAMDAGHSSFQFYKSGIYFEPDCSSKNLDHGVLVVGYGFEGANSNNSKYWLVKNSWGPEWGSNGYVKIAKDKNNHCGIATAASYPNV

SEQ ID NO: 39 - protein, 303 aa, Homo sapiens
MARRGPGWRPLLLLVLLAGAAQGGLYFRRGQTCYRPLRGDGLAPLGRSTYPRPHEYLSPADLPKSWDWRNVDGVNYASITRNQHIPQYCGSCWAHASTSAMADRINIKRKGAWPSTLLSVQNVIDCGNAGSCEGGNDLSVWDYAHQHGIPDETCNNYQAKDQECDKFNQCGTCNEFKECHAIRNYTLWRVGDYGSLSGREKMMAEIYANGPISCGIMATERLANYTGGIYAEYQDTTYINHVVSVAGWGISDGTEYWIVRNSWGEPWGERGWLRIVTSTYKDGKGARYNLAIEEHCTFGDPIV

SEQ ID NO: 40 - protein, 391 aa, Homo sapiens
MSGPVPSRARVYTDVNTHRPREYWDYESHVVEWGNQDDYQLVRKLGRGKYSEVFEAINITNNEKVVVKILKPVKKKKIKREIKILENLRGGPNIITLADIVKDPVSRTPALVFEHVNNTDFKQLYQTLTDYDIRFYMYEILKALDYCHSMGIMHRDVKPHNVMIDHEHRKLRLIDWGLAEFYHPGQEYNVRVASRYFKGPELLVDYQMYDYSLDMWSLGCMLASMIFRKEPFFHGHDNYDQLVRIAKVLGTEDLYDYIDKYNIELDPRFNDILGRHSRKRWERFVHSENQHLVSPEALDFLDKLLRYDHQSRLTAREAMEHPYFYTVVKDQARMGSSSMPGGSTPVSSANMMSGISSVPTPSPLGPLAGSPVIAAANPLGMPVPAAAGAQQ

SEQ ID NO: 41 - protein, 142 aa, Homo sapiens
MATKIDKEACRAAYNLVRDDGSAVIWVTFKYDGSTIVPGEQGAEYQHFIQQCTDDVRLFAFVRFTTGDAMSKRSKFALITWIGENVSGLQRAKTGTDKTLVKEVVQNFAKEFVISDRKELEEDFIKSELKKAGGANYDAQTE

SEQ ID NO: 42 - protein, 488 aa, Homo sapiens
MGRPLHLVLLSASLAGLLLLGESLFIRREQANNILARVTRANSFLEEMKKGHLERECMEETCSYEEAREVFEDSDKTNEFWNKYKDGDQCETSPCQNQGKCKDGLGEYTCTCLEGFEGKNCELFTRKLCSLDNGDCDQFCHEEQNSVVCSCARGYTLADNGKACIPTGPYPCGKQTLERRKRSVAQATSSSGEAPDSITWKPYDAADLDPTENPFDLLDFNQTQPERGDNNLTRIVGGQECKDGECPWQALLINEENEGFCGGTILSEFYILTAAHCLYQAKRFKVRVGDRNTEQEEGGEAVHEVEVVIKHNRFTKETYDFDIAVLRLKTPITFRMNVAPACLPERDWAESTLMTQKTGIVSGFGRTHEKGRQSTRLKMLEVPYVDRNSCKLSSSFIITQNMFCAGYDTKQEDACQGDSGGPHVTRFKDTYFVTGIVSWGEGCARKGKYGIYTKVTAFLKWIDRSMKTRGLPKAKSHAPEVITSSPLK

SEQ ID NO: 43 - protein, 166 aa, Homo sapiens
MASGVAVSDGVIKVFNDMKVRKSSTPEEVKKRKKAVLFCLSEDKKNIILEEGKEILVGDVGQTVDDPYATFVKMLPDKDCRYALYDATYETKESKKEDLVFIFWAPESAPLKSKMIYASSKDAIKKKLTGIKHELQANCYEEVKDRCTLAEKLGGSAVISLEGKPL

SEQ ID NO: 44 - protein, 200 aa, Homo sapiens
MGRLHCTEDPVPEAVGGDMQQLNQLGAQQFSALTEVLFHFLTEPKEVERFLAQLSEFATTNQISLGSLRSIVKSLLLVPNGALKKSLTAKQVQADFITLGLSEEKATYFSEKWKQNAPTLARWAIGQTLMINQLIDMEWKFGVTSGSSELEKVGSIFLQLKLVVKKGNQTENVYIELTLPQFYSFLHEMERVRTSMECFC

SEQ ID NO: 45 - protein, 450 aa, Homo sapiens
MGGMKYIFSLLFFLLLEGGKTEQVKHSETYCMFQDKKYRVGERWHPYLEPYGLVYCVNCICSENGNVLCSRVRCPNVHCLSPVHIPHLCCPRCPDSLPPVNNKVTSKSCEYNGTTYQHGELFVAEGLFQNRQPNQCTQCSCSEGNVYCGLKTCPKLTCAFPVSVPDSCCRVCRGDGELSWEHSDGDIFRQPANREARHSYHRSHYDPPPSRQAGGLSRFPGARSHRGALMDSQQASGTIVQIVINNKHKHGQVCVSNGKTYSHGESWHPNLRAFGIVECVLCTCNVTKQECKKIHCPNRYPCKYPQKIDGKCCKVCPGKKAKELPGQSFDNKGYFCGEETMPVYESVFMEDGETTRKIALETERPPQVEVHVWTIRKGILQHFHIEKISKRMFEELPHFKLVTRTTLSQWKIFTEGEAQISQMCSSRVCRTELEDLVKVLYLERSEKGHC

SEQ ID NO: 46 - protein, 224 aa, Homo sapiens
MEKLLCFLVLTSLSHAFGQTDMSRKAFVFPKESDTSYVSLKAPLTKPLKAFTVCLHFYTELSSTRGYSIFSYATKRQDNEILIFWSKDIGYSFTVGGSEILFEVPEVTVAPVHICTSWESASGIVEFWVDGKPRVRKSLKKGYTVGAEASIILGQEQDSFGGNFEGSQSLVGDIGNVNMWDFVLSPDEINTIYLGGPFSPNVLNWRALKYEVQGEVFTKPQLWP

SEQ ID NO: 47 - protein, 128 aa, Homo sapiens
MSLRLDTTPSCNSARPLHALQVLLLLSLLLTALASSTKGQTKRNLAKGKEESLDSDLYAELRCMCIKTTSGIHPKNIQSLEVIGKGTHCNQVEVIATLKDGRKICLDPDAPRIKKIVQKKLAGDESAD

SEQ ID NO: 48 - protein, 254 aa, Homo sapiens
MGRDLRPGSRVLLLLLLLLLVYLTQPGNGNEGSVTGSCYCGKRISSDSPPSVQFMNRLRKHLRAYHRCLYYTRFQLLSWSVCGGNKDPWVQELMSCLDLKECGHAYSGIVAHQKHLLPTSPPISQASEGASSDIHTPAQMLLSTLQSTQRPTLPVGSLSSDKELTRPNETTIHTAGHSLAAGPEAGENQKQPEKNAGPTARTSATVPVLCLLAIIFILTAALSYVLCKRRRGQSPQSSPDLPVHYIPVAPDSNT

SEQ ID NO: 49 - protein, 165 aa, Homo sapiens
MVNPTVFFDIAVDGEPLGRVSFELFADKVPKTAENFRALSTGEKGFGYKGSCFHRIIPGFMCQGGDFTRHNGTGGKSIYGEKFEDENFILKHTGPGILSMANAGPNTNGSQFFICTAKTEWLDGKHVVFGKVKEGMNIVEAMERFGSRNGKTSKKITIADCGQLE

SEQ ID NO: 50 - protein, 149 aa, Homo sapiens
MARSNLPLALGLALVAFCLLALPRDARARPQERMVGELRDLSPDDPQVQKAAQAAVASYNMGSNSIYYFRDTHIIKAQSQLVAGIKYFLTMEMGSTDCRKTRVTGDHVDLTTCPLAAGAQQEKLRCDFEVLVVPWQNSSQLLKHNCVQM

SEQ ID NO: 51 - protein, 381 aa, Homo sapiens
MTVARPSVPAALPLLGELPRLLLLVLLCLPAVWGDCGLPPDVPNAQPALEGRTSFPEDTVITYKCEESFVKIPGEKDSVICLKGSQWSDIEEFCNRSCEVPTRLNSASLKQPYITQNYFPVGTVVEYECRPGYRREPSLSPKLTCLQNLKWSTAVEFCKKKSCPNPGEIRNGQIDVPGGILFGATISFSCNTGYKLFGSTSSFCLISGSSVQWSDPLPECREIYCPAPPQIDNGIIQGERDHYGYRQSVTYACNKGFTMIGEHSIYCTVNNDEGEWSGPPPECRGKSLTSKVPPTVQKPTTVNVPTTEVSPTSQKTTTKTTTPNAQATRSTPVSRTTKHFHETTPNKGSGTTSGTTRLLSGHTCFTLTGLLGTLVTMGLLT

SEQ ID NO: 52 - protein, 430 aa, Homo sapiens
MAANLSRNGPALQEAYVRVVTEKSPTDWALFTYEGNSNDIRVAGTGEGGLEEMVEELNSGKVMYAFCRVKDPNSGLPKFVLINWTGEGVNDVRKGACASHVSTMASFLKGAHVTINARAEEDVEPECIMEKVAKASGANYSFHKESGRFQDVGPQAPVGSVYQKTNAVSEIKRVGKDSFWAKAEKEEENRRLEEKRRAEEAQRQLEQERRERELREAARREQRYQEQGGEASPQRTWEQQQEVVSRNRNEQESAVHPREIFKQKERAMSTTSISSPQPGKLRSPFLQKQLTQPETHFGREPAAAISRPRADLPAEEPAPSTPPCLVQAEEEAVYEEPPEQETFYEQPPLVQQQGAGSEHIDHHIQGQGLSGQGLCARALYDYQAADDTEISFDPENLITGIEVIDEGWWRGYGPDGHFGMFPANYVELIE

SEQ ID NO: 53 - protein, 300 aa, Homo sapiens
MRALEGPGLSLLCLVLALPALLPVPAVRGVAETPTYPWRDAETGERLVCAQCPPGTFVQRPCRRDSPTTCGPCPPRHYTQFWNYLERCRYCNVLCGEREEEARACHATHNRACRCRTGFFAHAGFCLEHASCPPGAGVIAPGTPSQNTQCQPCPPGTFSASSSSSEQCQPHRNCTALGLALNVPGSSSHDTLCTSCTGFPLSTRVPGAEECERAVIDFVAFQDISIKRLQRLLQALEAPEGWGPTPRAGRAALQLKLRRRLTELLGAQDGALLVRLLQALRVARMPGLERSVRERFLPVH

SEQ ID NO: 54 - protein, 404 aa, Homo sapiens
MSDSKEPRLQQLGLLEEEQLRGLGFRQTRGYKSLAGCLGHGPLVLQLLSFTLLAGLLVQVSKVPSSISQEQSRQDAIYQNLTQLKAAVGELSEKSKLQEIYQELTQLKAAVGELPEKSKLQEIYQELTRLKAAVGELPEKSKLQEIYQELTWLKAAVGELPEKSKMQEIYQELTRLKAAVGELPEKSKQQEIYQELTRLKAAVGELPEKSKQQEIYQELTRLKAAVGELPEKSKQQEIYQELTQLKAAVERLCHPCPWEWTFFQGNCYFMSNSQRNWHDSITACKEVGAQLVVIKSAEEQNFLQLQSSRSNRFTWMGLSDLNQEGTWQWVDGSPLLPSFKQYWNRGEPNNVGEEDCAEFSGNGWNDDKCNLAKFWICKKSAASCSRDEEQFLSPAPATPNPPPA

SEQ ID NO: 55 - protein, 201 aa, Homo sapiens
MDLSLLWVLLPLVTMAWGQYGDYGYPYQQYHDYSDDGWVNLNRQGFSYQCPQGQVIVAVRSIFSKKEGSDRQWNYACMPTPQSLGEPTECWWEEINRAGMEWYQTCSNNGLVAGFQSRYFESVLDREWQFYCCRYSKRCPYSCWLTTEYPGHYGEEMDMISYNYDYYIRGATTTFSAVERDRQWKFIMCRMTEYDCEFANV

SEQ ID NO: 56 - protein, 1049 aa, Homo sapiens
MDWSFFRVVAMLFIFLVVVEVNSEFRIQVRDYNTKNGTIKWHSIRRQKREWIKFAAACREGEDNSKRNPIAKIHSDCAANQQVTYRISGVGIDQPPYGIFVINQKTGEINITSIVDREVTPFFIIYCRALNSMGQDLERPLELRVRVLDINDNPPVFSMATFAGQIEENSNANTLVMILNATDADEPNNLNSKIAFKIIRQEPSDSPMFIINRNTGEIRTMNNFLDREQYGQYALAVRGSDRDGGADGMSAECECNIKILDVNDNIPYMEQSSYTIEIQENTLNSNLLEIRVIDLDEEFSANWMAVIFFISGNEGNWFEIEMNERTNVGILKVVKPLDYEAMQSLQLSIGVRNKAEFHHSIMSQYKLKASAISVTVLNVIEGPVFRPGSKTYVVTGNMGSNDKVGDFVATDLDTGRPSTTVRYVMGNNPADLLAVDSRTGKLTLKNKVTKEQYNMLGGKYQGTILSIDDNLQRTCTGTININIQSFGNDDRTNTEPNTKITTNTGRQESTSSTNYDTSTTSTDSSQVYSSEPGNGAKDLLSDNVHFGPAGIGLLIMGFLVLGLVPFLMICCDCGGAPRSAAGFEPVPECSDGAIHSWAVEGPQPEPRDITTVIPQIPPDNANIIECIDNSGVYTNEYGGREMQDLGGGERMTGFELTEGVKTSGMPEICQEYSGTLRRNSMRECREGGLNMNFMESYFCQKAYAYADEDEGRPSNDCLLIYDIEGVGSPAGSVGCCSFIGEDLDDSFLDTLGPKFKKLADISLGKESYPDLDPSWPPQSTEPVCLPQETEPVVSGHPPISPHFGTTTVISESTYPSGPGVLHPKPILDPLGYGNVTVTESYTTSDTLKPSVHVHDNRPASNVVVTERVVGPISGADLHGMLEMPDLRDGSNVIVTERVIAPSSSLPTSLTIHHPRESSNVVVTERVIQPTSGMIGSLSMHPELANAHNVIVTERVVSGAGVTGISGTTGISGGIGSSGLVGTSMGAGSGALSGAGISGGGIGLSSLGGTASIGHMRSSSDHHFNQTIGSASPSTARSRITKYSTVQYSK

SEQ ID NO: 57 - protein, 913 aa, Homo sapiens
MGPEALSSLLLLLLVASGDADMKGHFDPAKCRYALGMQDRTIPDSDISASSSWSDSTAARHSRLESSDGDGAWCPAGSVFPKEEEYLQVDLQRLHLVALVGTQGRHAGGLGKEFSRSYRLRYSRDGRRWMGWKDRWGQEVISGNEDPEGVVLKDLGPPMVARLVRFYPRADRVMSVCLRVELYGCLWRDGLLSYTAPVGQTMYLSEAVYLNDSTYDGHTVGGLQYGGLGQLADGVVGLDDFRKSQELRVWPGYDYVGWSNHSFSSGYVEMEFEFDRLRAFQAMQVHCNNMHTLGARLPGGVECRFRRGPAMAWEGEPMRHNLGGNLGDPRARAVSVPLGGRVARFLQCRFLFAGPWLLFSEISFISDVVNNSSPALGGTFPPAPWWPPGPPPTNFSSLELEPRGQQPVAKAEGSPTAILIGCLVAIILLLLLIIALMLWRLHWRRLLSKAERRVLEEELTVHLSVPGDTILINNRPGPREPPPYQEPRPRGNPPHSAPCVPNGSALLLSNPAYRLLLATYARPPRGPGPPTPAWAKPTNTQAYSGDYMEPEKPGAPLLPPPPQNSVPHYAEADIVTLQGVTGGNTYAVPALPPGAVGDGPPRVDFPRSRLRFKEKLGEGQFGEVHLCEVDSPQDLVSLDFPLNVRKGHPLLVAVKILRPDATKNARNDFLKEVKIMSRLKDPNIIRLLGVCVQDDPLCMITDYMENGDLNQFLSAHQLEDKAAEGAPGDGQAAQGPTISYPMLLHVAAQIASGMRYLATLNFVHRDLATRNCLVGENFTIKIADFGMSRNLYAGDYYRVQGRAVLPIRWMAWECILMGKFTTASDVWAFGVTLWEVLMLCRAQPFGQLTDEQVIENAGEFFRDQGRQVYLSRPPACPQGLYELMLRCWSRESEQRPPFSQLHRFLAEDALNTV

SEQ ID NO: 58 - protein, 855 aa, Homo sapiens
MILIPRMLLVLFLLLPILSSAKAQVNPAICRYPLGMSGGQIPDEDITASSQWSESTAAKYGRLDSEEGDGAWCPEIPVEPDDLKEFLQIDLHTLHFITLVGTQGRHAGGHGIEFAPMYKINYSRDGTRWISWRNRHGKQVLDGNSNPYDIFLKDLEPPIVARFVRFIPVTDHSMNVCMRVELYGCVWLDGLVSYNAPAGQQFVLPGGSIIYLNDSVYDGAVGYSMTEGLGQLTDGVSGLDDFTQTHEYHVWPGYDYVGWRNESATNGYIEIMFEFDRIRNFTTMKVHCNNMFAKGVKIFKEVQCYFRSEASEWEPNAISFPLVLDDVNPSARFVTVPLHHRMASAIKCQYHFADTWMMFSEITFQSDAAMYNNSEALPTSPMAPTTYDPMLKVDDSNTRILIGCLVAIIFILLAIIVIILWRQFWQKMLEKASRRMLDDEMTVSLSLPSDSSMFNNNRSSSPSEQGSNSTYDRIFPLRPDYQEPSRLIRKLPEFAPGEEESGCSGVVKPVQPSGPEGVPHYAEADIVNLQGVTGGNTYSVPAVTMDLLSGKDVAVEEFPRKLLTFKEKLGEGQFGEVHLCEVEGMEKFKDKDFALDVSANQPVLVAVKMLRADANKNARNDFLKEIKIMSRLKDPNIIHLLAVCITDDPLCMITEYMENGDLNQFLSRHEPPNSSSSDVRTVSYTNLKFMATQIASGMKYLSSLNFVHRDLATRNCLVGKNYTIKIADFGMSRNLYSGDYYRIQGRAVLPIRWMSWESILLGKFTTASDVWAFGVTLWETFTFCQEQPYSQLSDEQVIENTGEFFRDQGRQTYLPQPAICPDSVYKLMLSCWRRDTKNRPSFQEIHLLLLQQGDE

SEQ ID NO: 59 - protein, 266 aa, Homo sapiens
MMALGAAGATRVFVAMVAAALGGHPLLGVSATLNSVLNSNAIKNLPPPLGGAAGHPGSAVSAAPGILYPGGNKYQTIDNYQPYPCAEDEECGTDEYCASPTRGGDAGVQICLACRKRRKRCMRHAMCCPGNYCKNGICVSSDQNHFRGEIEETITESFGNDHSTLDGYSRRTTLSSKMYHTKGQEGSVCLRSSDCASGLCCARHFWSKICKPVLKEGQVCTKHRRKGSHGLEIFQRCYCGEGLSCRIQKDHHQASNSSRLHTCQRH

SEQ ID NO: 60 - protein, 350 aa, Homo sapiens
MQRLGATLLCLLLAAAVPTAPAPAPTATSAPVKPGPALSYPQEEATLNEMFREVEELMEDTQHKLRSAVEEMEAEEAAAKASSEVNLANLPPSYHNETNTDTKVGNNTIHVHREIHKITNNQTGQMVFSETVITSVGDEEGRRSHECIIDEDCGPSMYCQFASFQYTCQPCRGQRMLCTRDSECCGDQLCVWGHCTKMATRGSNGTICDNQRDCQPGLCCAFQRGLLFPVCTPLPVEGELCHDPASRLLDLITWELEPDGALDRCPCASGLLCQPHSHSLVYVCKPTFVGSRDQDGEILLPREVPDEYEVGSFMEEVRQELEDLERSLTEEMALREPAAAAAALLGGEEI

SEQ ID NO: 61 - protein, 224 aa, Homo sapiens
MVAAVLLGLSWLCSPLGALVLDFNNIRSSADLHGARKGSQCLSDTDCNTRKFCLQPRDEKPFCATCRGLRRRCQRDAMCCPGTLCVNDVCTTMEDATPILERQLDEQDGTHAEGTTGHPVQENQPKRKPSIKKSQGRKGQEGESCLRTFDCGPGLCCARHFWTKICKPVLLEGQVCSRRGHKDTAQAPEIFQRCDCGPGLLCRSQLTSNRQHARLRVCQKIEKL

SEQ ID NO: 62 - protein, 96 aa, Homo sapiens
MAEVEETLKRLQSQKGVQGIIVVNTEGIPIKSTMDNPTTTQYASLMHSFILKARSTVRDIDPQNDLTFLRIRSKKNEIMVAPDKDYFLIVIQNPTE

SEQ ID NO: 63 - protein, 492 aa, Homo sapiens [sequence omitted]

SEQ ID NO: 64 - protein, 154 aa, Homo sapiens
MADDLDFETGDAGASATFPMQCSALRKNGFVVLKGRPCKIVEMSTSKTGKHGHAKVHLVGIDIFTGKKYEDICPSTHNMDVPNIKRNDFQLIGIQDGYLSLLQDSGEVREDLRLPEGDLGKEIEQKYDCGEEILITVLSAMTEEAAVAIKAMAK

SEQ ID NO: 65 - protein, 117 aa, Homo sapiens
MRASSFLIVVVFLIAGTLVLEAAVTGVPVKGQDTVKGRVPFNGQDPVKGQVSVKGQDKVKAQEPVKGPVSTKPGSCPIILIRCAMLNPPNRCLKDTDCPGIKKCCEGSCGMACFVPQ

SEQ ID NO: 66 - protein, 823 aa, Homo sapiens
MGGRVFLVFLAFCVWLTLPGAETQDSRGCARWCPQDSSCVNATACRCNPGFSSFSEIITTPMETCDDINECATLSKVSCGKFSDCWNTEGSYDCVCSPGYEPVSGAKTFKNESENTCQDVDECQQNPRLCKSYGTCVNTLGSYTCQCLPGFKLKPEDPKLCTDVNECTSGQNPCHSSTHCLNNVGSYQCRCRPGWQPIPGSPNGPNNTVCEDVDECSSGQHQCDSSTVCFNTVGSYSCRCRPGWKPRHGIPNNQKDTVCEDMTFSTWTPPPGVHSQTLSRFFDKVQDLGRDYKPGLANNTIQSILQALDELLEAPGDLETLPRLQQHCVASHLLDGLEDVLRGLSKNLSNGLLNFSYPAGTELSLEVQKQVDRSVTLRQNQAVMQLDWNQAQKSGDPGPSVVGLVSIPGMGKLLAEAPLVLEPEKQMLLHETHQGLLQDGSPILLSDVISAFLSNNDTQNLSSPVTFTFSHRSVIPRQKVLCVFWEHGQNGCGHWATTGCSTIGTRDTSTICRCTHLSSFAVLMAHYDVQEEDPVLTVITYMGLSVSLLCLLLAALTFLLCKAIQNTSTSLHLQLSLCLFLAHLLFLVAIDQTGHKVLCSIIAGTLHYLYLATLTWMLLEALYLFLTARNLTVVNYSSINRFMKKLMFPVGYGVPAVTVAISAASRPHLYGTPSRCWLQPEKGFIWGFLGPVCAIFSVNLVLFLVTLWILKNRLSSLNSEVSTLRNTRMLAFKATAQLFILGCTWCLGILQVGPAARVMAYLFTIINSLQGVFIFLVYCLLSQQVREQYGKWSKGIRKLKTESEMHTLSSSAKADTSKPSTVN

SEQ ID NO: 67 - protein, 114 aa, Homo sapiens
MSLLSSRAARVPGPSSSLCALLVLLLLLTQPGPIASAGPAAAVLRELRCVCLQTTQGVHPKMISNLQVFAIGPQCSKVEVVASLKNGKEICLDPEAPFLKKVIQKILDGGNKEN

SEQ ID NO: 68 - protein, 184 aa, Homo sapiens
MKSVLLLTTLLVPAHLVAAWSNNYAVDCPQHCDSSECKSSPRCKRTVLDDCGCCRVCAAGRGETCYRTVSGMDGMKCGPGLRCQPSNGEDPFGEEFGICKDCPYGTFGMDCRETCNCQSGICDRGTGKCLKFPFFQYSVTKSSNRFVSLTEHDMASGDGNIVREEVVKENAAGSPVMRKWLNPR

SEQ ID NO: 69 - protein, 770 aa, Homo sapiens
MRGVWPPPVSALLSALGMSTYKRATLDEEDLVDSLSEGDAYPNGLQVNFHSPRSGQRCWAARTQVEKRLVVLVVLLAAGLVACLAALGIQYQTRSPSVCLSEACVSVTSSILSSMDPTVDPCHDFFSYACGGWIKANPVPDGHSRWGTFSNLWEHNQAIIKHLLENSTASVSEAERKAQVYYRACMNETRIEELRAKPLMELIERLGGWNITGPWAKDNFQDTLQVVTAHYRTSPFFSVYVSADSKNSNSNVIQVDQSGLGLPSRDYYLNKTENEKVLTGYLNYMVQLGKLLGGGDEEAIRPQMQQILDFETALANITIPQEKRRDEELIYHKVTAAELQTLAPAINWLPFLNTIFYPVEINESEPIVVYDKEYLEQISTLINTTDRCLLNNYMIWNLVRKTSSFLDQRFQDADEKFMEVMYGTKKTCLPRWKFCVSDTENNLGFALGPMFVKATFAEDSKSIATEIILEIKKAFEESLSTLKWMDEETRKSAKEKADAIYNMIGYPNFIMDPKELDKVFNDYTAVPDLYFENAMRFFNFSWRVTADQLRKAPNRDQWSMTPPMVNAYYSPTKNEIVFPAGILQAPFYTRSSPKALNFGGIGVVVGHELTHAFDDQGREYDKDGNLRPWWKNSSVEAFKRQTECMVEQYSNYSVNGEPVNGRHTLGENIADNGGLKAAYRAYQNWVKKNGAEHSLPTLGLTNNQLFFLGFAQVWCSVRTPESSHEGLITDPHSPSRFRVIGSLSNSKEFSEHFRCPPGSPMNPPHKCEVW

SEQ ID NO: 70 - protein, 97 aa, Homo sapiens
MKVSAALLWLLLIAAAFSPQGLAGPASVPTTCCFNLANRKIPLQRLESYRRITSGKCPQKAVIFKTKLAKDICADPKKKWVQDSMKYLDQKSPTPKP

SEQ ID NO: 71 - protein, 983 aa, Homo sapiens
MDCQLSILLLLSCSVLDSFGELIPQPSNEVNLLDSKTIQGELGWISYPSHGWEEISGVDEHYTPIRTYQVCNVMDHSQNNWLRTNWVPRNSAQKIYVELKFTLRDCNSIPLVLGTCKETFNLYYMESDDDHGVKFREHQFTKIDTIAADESFTQMDLGDRILKLNTEIREVGPVNKKGFYLAFQDVGACVALVSVRVYFKKCPFTVKNLAMFPDTVPMDSQSLVEVRGSCVNNSKEEDPPRMYCSTEGEWLVPIGKCSCNAGYEERGFMCQACRPGFYKALDGNMKCAKCPPHSSTQEDGSMNCRCENNYFRADKDPPSMACTRPPSSPRNVISNINETSVILDWSWPLDTGGRKDVTFNIICKKCGWNIKQCEPCSPNVRFLPRQFGLTNTTVTVTDLLAHTNYTFEIDAVNGVSELSSPPRQFAAVSITTNQAAPSPVLTIKKDRTSRNSISLSWQEPEHPNGIILDYEVKYYEKQEQETSYTILRARGTNVTISSLKPDTIYVFQIRARTAAGYGTNSRKFEFETSPDSFSISGESSQVVMIAISAAVAIILLTVVIYVLIGRFCGYKSKHGADEKRLHFGNGHLKLPGLRTYVDPHTYEDPTQAVHEFAKELDATNISIDKVVGAGEFGEVCSGRLKLPSKKEISVAIKTLKVGYTEKQRRDFLGEASIMGQFDHPNIIRLEGVVTKSKPVMIVTEYMENGSLDSFLRKHDAQFTVIQLVGMLRGIASGMKYLSDMGYVHRDLAARNILINSNLVCKVSDFGLSRVLEDDPEAAYTTRGGKIPIRWTSPEAIAYRKFTSASDVWSYGIVLWEVMSYGERPYWEMSNQDVIKAVDEGYRLPPPMDCPAALYQLMLDCWQKDRNNRPKFEQIVSILDKLIRNPGSLKIITSAAARPSNLLLDQSNVDITTFRTTGDWLNGVWTAHCKEIFTGVEYSSCDTIAKISTDDMKKVGVTVVGPQKKIISSIKALETQSKNGPVPV

SEQ ID NO: 72 - protein, 987 aa, Homo sapiens
MELRVLLCWASLAAALEETLLNTKLETADLKWVTFPQVDGQWEELSGLDEEQHSVRTYEVCDVQRAPGQAHWLRTGWVPRRGAVHVYATLRFTMLECLSLPRAGRSCKETFTVFYYESDADTATALTPAWMENPYIKVDTVAAEHLTRKRPGAEATGKVNVKTLRLGPLSKAGFYLAFQDQGACMALLSLHLFYKKCAQLTVNLTRFPETVPRELVVPVAGSCVVDAVPAPGPSPSLYCREDGQWAEQPVTGCSCAPGFEAAEGNTKCRACAQGTFKPLSGEGSCQPCPANSHSNTIGSAVCQCRVGYFRARTDPRGAPCTTPPSAPRSVVSRLNGSSLHLEWSAPLESGGREDLTYALRCRECRPGGSCAPCGGDLTFDPGPRDLVEPWVVVRGLRPDFTYTFEVTALNGVSSLATGPVPFEPVNVTTDREVPPAVSDIRVTRSSPSSLSLAWAVPRAPSGAVLDYEVKYHEKGAEGPSSVRFLKTSENRAELRGLKRGASYLVQVRARSEAGYGPFGQEHHSQTQLDESEGWREQLALIAGTAVVGVVLVLVVIVVAVLCLRKQSNGREAEYSDKHGQYLIGHGTKVYIDPFTYEDPNEAVREFAKEIDVSYVKIEEVIGAGEFGEVCRGRLKAPGKKESCVAIKTLKGGYTERQRREFLSEASIMGQFEHPNIIRLEGVVTNSMPVMILTEFMENGALDSFLRLNDGQFTVIQLVGMLRGIASGMRYLAEMSYVHRDLAARNILVNSNLVCKVSDFGLSRFLEENSSDPTYTSSLGGKIPIRWTAPEAIAFRKFTSASDAWSYGIVMWEVMSFGERPYWDMSNQDVINAIEQDYRLPPPPDCPTSLHQLMLDCWQKDRNARPRFPQVVSALDKMIRNPASLKIVARENGGASHPLLDQRQPHYSAFGSVGEWLRAIKMGRYEESFAAAGFGSFELVSQISAEDLLRIGVTLAGHQKKILASVQHMKSQAKPGTPGGTGGPAPQY

SEQ ID NO: 73 - protein, 228 aa, Homo sapiens
MLHVEMLTLVFLVLWMCVFSQDPGSKAVADRYAVYWNSSNPRFQRGDYHIDVCINDYLDVFCPHYEDSVPEDKTERYVLYMVNFDGYSACDHTSKGFKRWECNRPHSPNGPLKFSEKFQLFTPFSLGFEFRPGREYFYISSAIPDNGRRSCLKLKVFVRPTNSCMKTIGVHDRVFDVNDKVENSLEPADDTVHESAEPSRGENAAQTPRIPSRLLAILLFLLAMLLTL

SEQ ID NO: 74 - protein, 340 aa, Homo sapiens
MGPPHSGPGGVRVGALLLLGVLGLVSGLSLEPVYWNSANKRFQAEGGYVLYPQIGDRLDLLCPRARPPGPHSSPNYEFYKLYLVGGAQGRRCEAPPAPNLLLTCDRPDLDLRFTIKFQEYSPNLWGHEFRSHHDYYIIATSDGTREGLESLQGGVCLTRGMKVLLRVGQSPRGGAVPRKPVSEMPMERDRGAAHSLEPGKENLPGDPTSNATSRGAEGPLPPPSMPAVAGAAGGLALLLLGVAGAGGAMCWRRRRAKPSESRHPGPGSFGRGGSLGLGGGGGMGPREAEPGELGIALRGGGAADPPFCPHYEKVSGDYGHPVYIVQDGPPQSPPNIYYKV

SEQ ID NO: 75 - protein, 169 aa, Homo sapiens
MTAGRRMEMLCAGRVPALLLCLGFHLLQAVLSTTVIPSCIPGESSDNCTALVQTEDNPRVAQVSITKCSSDMNGYCLHGQCIYLVDMSQNYCRCEVGYTGVRCEHFFLTVHQPLSKEYVALTVILIILFLITVVGSTYYFCRWYRNRKSKEPKKEYERVTSGDPELPQV

SEQ ID NO: 76 - protein, 976 aa, Homo sapiens
MELQAARACFALLWGCALAAAAAAQGKEVVLLDFAAAGGELGWLTHPYGKGWDLMQNIMNDMPIYMYSVCNVMSGDQDNWLRTNWVYRGEAERIFIELKFTVRDCNSFPGGASSCKETFNLYYAESDLDYGTNFQKRLFTKIDTIAPDEITVSSDFEARHVKLNVEERSVGPLTRKGFYLAFQDIGACVALLSVRVYYKKCPELLQGLAHFPETIAGSDAPSLATVAGTCVDHAVVPPGGEEPRMHCAVDGEWLVPIGQCLCQAGYEKVEDACQACSPGFFKFEASESPCLECPEHTLPSPEGATSCECEEGFFRAPQDPASMPCTRPPSAPHYLTAVGMGAKVELRWTPPQDSGGREDIVYSVTCEQCWPESGECGPCEASVRYSEPPHGLTRTSVTVSDLEPHMNYTFTVEARNGVSGLVTSRSFRTASVSINQTEPPKVRLEGRSTTSLSVSWSIPPPQQSRVWKYEVTYRKKGDSNSYNVRRTEGFSVTLDDLAPDTTYLVQVQALTQEGQGAGSKVHEFQTLSPEGSGNLAVIGGVAVGVVLLLVLAGVGFFIHRRRKNQRARQSPEDVYFSKSEQLKPLKTYVDPHTYEDPNQAVLKFTTEIHPSCVTRQKVIGAGEFGEVYKGMLKTSSGKKEVPVAIKTLKAGYTEKQRVDFLGEAGIMGQFSHHNIIRLEGVISKYKPMMIITEYMENGALDKFLREKDGEFSVLQLVGMLRGIAAGMKYLANMNYVHRDLAARNILVNSNLVCKVSDFGLSRVLEDDPEATYTTSGGKIPIRWTAPEAISYRKFTSASDVWSFGIVMWEVMTYGERPYWELSNHEVMKAINDGFRLPTPMDCPSAIYQLMMQCWQQERARRPKFADIVSILDKLIRAPDSLKTLADFDPRVSIRLPSTSGSEGVPFRTVSEWLESIKMQQYTEHFMAAGYTAIEKVVQMTNDDIKRIGVRLPGHQKRIAYSLLGLKDQVNTVGIPI

SEQ ID NO: 77 - protein, 287 aa, Homo sapiens
MDPKQTTLLCLVLCLGQRIQAQEGDFPMPFISAKSSPVIPLDGSVKIQCQAIREAYLTQLMIIKNSTYREIGRRLKFWNETDPEFVIDHMDANKAGRYQCQYRIGHYRFRYSDTLELVVTGLYGKPFLSADRGLVLMPGENISLTCSSAHIPFDRFSLAKEGELSLPQHQSGEHPANFSLGPVDLNVSGIYRCYGWYNRSPYLWSFPSNALELVVTDSIHQDYTTQNLIRMAVAGLVLVALLAILVENWHSHTALNKEASADVAEPSWSQQMCQPGLTFARTPSVCK

SEQ ID NO: 78 - protein, 207 aa, Homo sapiens
MYSAPSACTCLCLHFLLLCFQVQVLVAEENVDFRIHVENQTRARDDVSRKQLRLYQLYSRTSGKHIQVLGRRISARGEDGDKYAQLLVETDTFGSQVRIKGKETEFYLCMNRKGKLVGKPDGTSKECVFIEKVLENNYTALMSAKYSGWYVGFTKKGRPRKGPKTRENQQDVHFMKRYPKGQPELQKPFKYTTVTKRSRRIRPTHPA

SEQ ID NO: 79 - protein, 211 aa, Homo sapiens
MAPLAEVGGFLGGLEGLGQQVGSHFLLPPAGERPPLLGERRSAAERSARGGPGAAQLAHLHGILRRRQLYCRTGFHLQILPDGSVQGTRQDHSLFGILEFISVAVGLVSIRGVDSGLYLGMNDKGELYGSEKLTSECIFREQFEENWYNTYSSNIYKHGDTGRRYFVALNKDGTPRDGARSKRHQKFTHFLPRPVDPERVPELYKDLLMYT

SEQ ID NO: 80 - protein, 194 aa, Homo sapiens
MHKWILTWILPTLLYRSCFHIICLVGTISLACNDMTPEQMATNVNCSSPERHTRSYDYMEGGDIRVRRLFCRTQWYLRIDKRGKVKGTQEMKNNYNIMEIRTVAVGIVAIKGVESEFYLAMNKEGKLYAKKECNEDCNFKELILENHYNTYASAKWTHNGGEMFVALNQKGIPVRGKKTKKEQKTAHFLPMAIT

SEQ ID NO: 81 - protein, 993 aa, Homo sapiens
MPALARDGGQLPLLVVFSAMIFGTITNQDLPVIKCVLINHKNNDSSVGKSSSYPMVSESPEDLGCALRPQSSGTVYEAAAVEVDVSASITLQVLVDAPGNISCLWVFKHSSLNCQPHFDLQNRGVVSMVILKMTETQAGEYLLFIQSEATNYTILFTVSIRNTLLYTLRRPYFRKMENQDALVCISESVPEPIVEWVLCDSQGESCKEESPAVVKKEEKVLHELFGTDIRCCARNELGRECTRLFTIDLNQTPQTTLPQLFLKVGEPLWIRCKAVHVNHGFGLTWELENKALEEGNYFEMSTYSTNRTMIRILFAFVSSVARNDTGYYTCSSSKHPSQSALVTIVEKGFINATNSSEDYEIDQYEEFCFSVRFKAYPQIRCTWTFSRKSFPCEQKGLDNGYSISKFCNHKHQPGEYIFHAENDDAQFTKMFTLNIRRKPQVLAEASASQASCFSDGYPLPSWTWKKCSDKSPNCTEEITEGVWNRKANRKVFGQWVSSSTLNMSEAIKGFLVKCCAYNSLGTSCETILLNSPGPFPFIQDNISFYATIGVCLLFIVVLTLLICHKYKKQFRYESQLQMVQVTGSSDNEYFYVDFREYEYDLKWEFPRENLEFGKVLGSGAFGKVMNATAYGISKTGVSIQVAVKMLKEKADSSEREALMSELKMMTQLGSHENIVNLLGACTLSGPIYLIFEYCCYGDLLNYLRSKREKFHRTWTEIFKEHNFSFYPTFQSHPNSSMPGSREVQIHPDSDQISGLHGNSFHSEDEIEYENQKRLEEEEDLNVLTFEDLLCFAYQVAKGMEFLEFKSCVHRDLAARNVLVTHGKVVKICDFGLARDIMSDSNYVVRGNARLPVKWMAPESLFEGIYTIKSDVWSYGILLWEIFSLGVNPYPGIPVDANFYKLIQNGFKMDQPFYATEEIYIIMQSCWAFDSRKRPSFPNLTSFLGCQLADAEEAMYQNVDGRVSECPHTYQNRRPFSREMDLGLLSPQAQVEDS

SEQ ID NO: 82 - protein, 344 aa, Homo sapiens
MVRARHQPGGLCLLLLLLCQFMEDRSAQAGNCWLRQAKNGRCQVLYKTELSKEECCSTGRLSTSWTEEDVNDNTLFKWMIFNGGAPNCIPCKETCENVDCGPGKKCRMNKKNKPRCVCAPDCSNITWKGPVCGLDGKTYRNECALLKARCKEQPELEVQYQGRCKKTCRDVFCPGSSTCVVDQTNNAYCVTCNRICPEPASSEQYLCGNDGVTYSSACHLRKATCLLGRSIGLAYEGKCIKAKSCEDIQCTGGKKCLWDFKVGRGRCSLCDELCPDSKSDEPVCASDNATYASECAMKEAACSSGVLLEVKHSGSCNSISEDTEEEEEDEDQDYSFPISSILEW

SEQ ID NO: 83 - protein, 263 aa, Homo sapiens
MRPGAPGPLWPLPWGALAWAVGFVSSMGSGNPAPGGVCWLQQGQEATCSLVLQTDVTRAECCASGNIDTAWSNLTHPGNKINLLGFLGLVHCLPCKDSCDGVECGPGKACRMLGGRPRCECAPDCSGLPARLQVCGSDGATYRDECELRAARCRGHPDLSVMYRGRCRKSCEHVVCPRPQSCVVDQTGSAHCVVCRAAPCPVPSSPGQELCGNNNVTYISSCHMRQATCFLGRSIGVRHAGSCAGTPEEPPGGESAEEEENFV

SEQ ID NO: 84 - protein, 250 aa, Homo sapiens [sequence omitted]

SEQ ID NO: 85 - protein, 335 aa, Homo sapiens
MGKVKVGVNGFGRIGRLVTRAAFNSGKVDIVAINDPFIDLNYMVYMFQYDSTHGKFHGTVKAENGKLVINGNPITIFQERDPSKIKWGDAGAEYVVESTGVFTTMEKAGAHLQGGAKRVIISAPSADAPMFVMGVNHEKYDNSLKIISNASCTTNCLAPLAKVIHDNFGIVEGLMTTVHAITATQKTVDGPSGKLWRDGRGALQNIIPASTGAAKAVGKVIPELNGKLTGMAFRVPTANVSVVDLTCRLEKPAKYDDIKKVVKQASEGPLKGILGYTEHQVVSSDFNSDTHSSTFDAGAGIALNDHFVKLISWYDNEFGYSNRVVDLMAHMASKE

SEQ ID NO: 86 - protein, 114 aa, Homo sapiens
MSLPSSRAARVPGPSGSLCALLALLLLLTPPGPLASAGPVSAVLTELRCTCLRVTLRVNPKTIGKLQVFPAGPQCSKVEVVASLKNGKQVCLDPEAPFLKKVIQKILDSGNKKN

SEQ ID NO: 87 - protein, 207 aa, Homo sapiens
MAGPATQSPMKLMALQLLLWHSALWTVQEATPLGPASSLPQSFLLKCLEQVRKIQGDGAALQEKLVSECATYKLCHPEELVLLGHSLGIPWAPLSSCPSQALQLAGCLSQLHSGLFLYQGLLQALEGISPELGPTLDTLQLDVADFATTIWQQMEELGMAPALQPTQGAMPAFASAFQRRAGGVLVASHLQSFLEVSYRVLRHLAQP

SEQ ID NO: 88 - protein, 454 aa, Homo sapiens
MARPNKFLLWFCCFAWLCFPISLGSQASGGEAQIAASAELESGAMPWSLLQHIDERDRAGLLPALFKVLSVGRGGSPRLQPDSRALHYMKKLYKTYATKEGIPKSNRSHLYNTVRLFTPCTRHKQAPGDQVTGILPSVELLFNLDRITTVEHLLKSVLLYNINNSVSFSSAVKCVCNLMIKEPKSSSRTLGRAPYSFTFNSQFEFGKKHKWIQIDVTSLLQPLVASNKRSIHMSINFTCMKDQLEHPSAQNGLFNMTLVSPSLILYLNDTSAQAYHSWYSLHYKRRPSQGPDQERSLSAYPVGEEAAEDGRSSHHRHRRGQETVSSELKKPLGPASFNLSEYFRQFLLPQNECELHDFRLSFSQLKWDNWIVAPHRYNPRYCKGDCPRAVGHRYGSPVHTMVQNIIYEKLDSSVPRPSCVPAKYSPLSVLTIEPDGSIAYKEYEDMIATKCTCR

SEQ ID NO: 89 - protein, 918 aa, Homo sapiens
MLTLQTWLVQALFIFLTTESTGELLDPCGYISPESPVVQLHSNFTAVCVLKEKCMDYFHVNANYIVWKTNHFTIPKEQYTIINRTASSVTFTDIASLNIQLTCNILTFGQLEQNVYGITIISGLPPEKPKNLSCIVNEGKKMRCEWDGGRETHLETNFTLKSEWATHKFADCKAKRDTPTSCTVDYSTVYFVNIEVWVEAENALGKVTSDHINFDPVYKVKPNPPHNLSVINSEELSSILKLTWTNPSIKSVIILKYNIQYRTKDASTWSQIPPEDTASTRSSFTVQDLKPFTEYVFRIRCMKEDGKGYWSDWSEEASGITYEDRPSKAPSFWYKIDPSHTQGYRTVQLVWKTLPPFEANGKILDYEVTLTRWKSHLQNYTVNATKLTVNLTNDRYLATLTVRNLVGKSDAAVLTIPACDFQATHPVMDLKAFPKDNMLWVEWTTPRESVKKYILEWCVLSDKAPCITDWQQEDGTVHRTYLRGNLAESKCYLITVTPVYADGPGSPESIKAYLKQAPPSKGPTVRTKKVGKNEAVLEWDQLPVDVQNGFIRNYTIFYRTIIGNETAVNVDSSHTEYTLSSLTSDTLYMVRMAAYTDEGGKDGPEFTFTTPKFAQGEIEAIVVPVCLAFLLTTLLGVLFCFNKRDLIKKHIWPNVPDPSKSHIAQWSPHTPPRHNFNSKDQMYSDGNFTDVSVVEIEANDKKPFPEDLKSLDLFKKEKINTEGHSSGIGGSSCMSSSRPSISSSDENESSQNTSSTVQYSTVVHSGYRHQVPSVQVFSRSESTQPLLDSEERPEDLQLVDHVDGGDGILPRQQYFKQNCSQHESSPDISHFERSKQVSSVNEEDFVRLKQQISDHISQSCGSGQMKMFQEVSAADAFGPGTEGQVERFETVGMEAATDEGMPKSYLPQTVRQGGYMPQ

SEQ ID NO: 90 - protein, 184 aa, Homo sapiens
MSRTAYTVGALLLLLGTLLPAAEGKKKGSQGAIPPPDKAQHNDSEQTQSPQQPGSRNRGRGQGRGTAMPGEEVLESSQEALHVTERKYLKRDWCKTQPLKQTIHEEGCNSRTIINRFCYGQCNSFYIPRHIRKEEGSFQSCSFCKPKKFTTMMVTLNCPELQPPTKKKRVTRVKQCRCISIDLD

SEQ ID NO: 91 - protein, 593 aa, Homo sapiens
MWTLVSWVALTAGLVAGTRCPDGQFCPVACCLDPGGASYSCCRPLLDKWPTTLSRHLGGPCQVDAHCSAGHSCIFTVSGTSSCCPFPEAVACGDGHHCCPRGFHCSADGRSCFQRSGNNSVGAIQCPDSQFECPDFSTCCVMVDGSWGCCPMPQASCCEDRVHCCPHGAFCDLVHTRCITPTGTHPLAKKLPAQRTNRAVALSSSVMCPDARSRCPDGSTCCELPSGKYGCCPMPNATCCSDHLHCCPQDTVCDLIQSKCLSKENATTDLLTKLPAHTVGDVKCDMEVSCPDGYTCCRLQSGAWGCCPFTQAVCCEDHIHCCPAGFTCDTQKGTCEQGPHQVPWMEKAPAHLSLPDPQALKRDVPCDNVSSCPSSDTCCQLTSGEWGCCPIPEAVCCSDHQHCCPQGYTCVAEGQCQRGSEIVAGLEKMPARRASLSHPRDIGCDQHTSCPVGQTCCPSLGGSWACCQLPHAVCCEDRQHCCPAGYTCNVKARSCEKEVVSAQPATFLARSPHVGVKDVECGEGHFCHDNQTCCRDNRQGWACCPYRQGVCCADRRHCCPAGFRCAARGTKCLRREAPRWDAPLRDPALRQLL

SEQ ID NO: 92 - protein, 107 aa, Homo sapiens
MARAALSAAPSNPRLLRVALLLLLLVAAGRRAAGASVATELRCQCLQTLQGIHPKNIQSVNVKSPGPHCAQTEVIATLKNGRKACLNPASPIVKKIIEKMLNSDKSN

SEQ ID NO: 93 - protein, 107 aa, Homo sapiens
MAHATLSAAPSNPRLLRVALLLLLLVAASRRAAGASVVTELRCQCLQTLQGIHLKNIQSVNVRSPGPHCAQTEVIATLKNGKKACLNPASPMVQKIIEKILNKGSTN

SEQ ID NO: 94 - protein, 138 aa, Homo sapiens
MKGLLPLAWFLACSVPAVQGGLLDLKSMIEKVTGKNALTNYGFYGCYCGWGGRGTPKDGTDWCCWAHDHCYGRLEEKGCNIRTQSYKYRFAWGVVTCEPGPFCHVNLCACDRKLVYCLKRNLRSYNPQYQYFPNILCS

SEQ ID NO: 95 - protein, 529 aa, Homo sapiens
MAPARTMARARLAPAGIPAVALWLLCTLGLQGTQAGPPPAPPGLPAGADCLNSFTAGVPGFVLDTNASVSNGATFLESPTVRRGWDCVRACCTTQNCNLALVELQPDRGEDAIAACFLINCLYEQNFVCKFAPREGFINYLTREVYRSYRQLRTQGFGGSGIPKAWAGIDLKVQPQEPLVLKDVENTDWRLLRGDTDVRVERKDPNQVELWGLKEGTYLFQLTVTSSDHPEDTANVTVTVLSTKQTEDYCLASNKVGRCRGSFPRWYYDPTEQICKSFVYGGCLGNKNNYLREEECILACRGVQGGPLRGSSGAQATFPQGPSMERRHPVCSGTCQPTQFRCSNGCCIDSFLECDDTPNCPDASDEAACEKYTSGFDELQRIHFPSDKGHCVDLPDTGLCKESIPRWYYNPFSEHCARFTYGGCYGNKNNFEEEQQCLESCRGISKKDVFGLRREIPIPSTGSVEMAVAVFLVICIVVVVAILGYCFFKNQRKDFHGHHHHPPPTPASSTVSTTEDTEHLVYNHTTRPL

SEQ ID NO: 96 - protein, 728 aa, Homo sapiens
MWVTKLLPALLLQHVLLHLLLLPIAIPYAEGQRKRRNTIHEFKKSAKTTLIKIDPALKIKTKKVNTADQCANRCTRNKGLPFTCKAFVFDKARKQCLWFPFNSMSSGVKKEFGHEFDLYENKDYIRNCIIGKGRSYKGTVSITKSGIKCQPWSSMIPHEHSFLPSSYRGKDLQENYCRNPRGEEGGPWCFTSNPEVRYEVCDIPQCSEVECMTCNGESYRGLMDHTESGKICQRWDHQTPHRHKFLPERYPDKGFDDNYCRNPDGQPRPWCYTLDPHTRWEYCAIKTCADNTMNDTDVPLETTECIQGQGEGYRGTVNTIWNGIPCQRWDSQYPHEHDMTPENFKCKDLRENYCRNPDGSESPWCFTTDPNIRVGYCSQIPNCDMSHGQDCYRGNGKNYMGNLSQTRSGLTCSMWDKNMEDLHRHIFWEPDASKLNENYCRNPDDDAHGPWCYTGNPLIPWDYCPISRCEGDTTPTIVNLDHPVISCAKTKQLRVVNGIPTRTNIGWMVSLRYRNKHICGGSLIKESWVLTARQCFPSRDLKDYEAWLGIHDVHGRGDEKCKQVLNVSQLVYGPEGSDLVLMKLARPAVLDDFVSTIDLPNYGCTIPEKTSCSVYGWGYTGLINYDGLLRVAHLYIMGNEKCSQHHRGKVTLNESEICAGAEKIGSGPCEGDYGGPLVCEQHKMRMVLGVIVPGRGCAIPNRPGIFVRVAYYAKWIHKIILTYKVPQS

SEQ ID NO: 97 - protein, 128 aa, Homo sapiens
MAGGKAGKDSGKAKTKAVSRSQRAGLQFPVGRIHRHLKSRTTSHGRVGATAAVYSAAILEYLTAEVLELAGNASKDLKVKRITPRHLQLAIRGDEELDSLIKATIAGGGVIPHIHKSLIGKKGQQKTV

SEQ ID NO: 98 - protein, 332 aa, Homo sapiens
MSEAGEEQPMETTGATENGHEAVPEASRGRGWTGAAAGAGGATAAPPSGNQNGAEGDQINASKNEEDAGKMFVGGLSWDTSKKDLKDYFTKFGEVVDCTIKMDPNTGRSRGFGFILFKDAASVEKVLDQKEHRLDGRVIDPKKAMAMKKDPVKKIFVGGLNPESPTEEKIREYFGEFGEIEAIELPMDPKLNKRRGFVFITFKEEEPVKKVLEKKFHTVSGSKCEIKVAQPKEVYQQQQYGSGGRGNRNRGNRGSGGGGGGGGQSQSWNQGYGNYWNQGYGYQQGYGPGYGGYDYSPYGYYGYGPGYDYSQGSTNYGKSQRRGGHQNNYKPY

SEQ ID NO: 99 - protein, 623 aa, Homo sapiens
MATEHVNGNGTEEPMDTTSAVIHSENFQTLLDAGLPQKVAEKLDEIYVAGLVAHSDLDERAIEALKEFNEDGALAVLQQFKDSDLSHVQNKSAFLCGVMKTYRQREKQGTKVADSSKGPDEAKIKALLERTGYTLDVTTGQRKYGGPPPDSVYSGQQPSVGTEIFVGKIPRDLFEDELVPLFEKAGPIWDLRLMMDPLTGLNRGYAFVTFCTKEAAQEAVKLYNNHEIRSGKHIGVCISVANNRLFVGSIPKSKTKEQILEEFSKVTEGLTDVILYHQPDDKKKNRGFCFLEYEDHKTAAQARRRLMSGKVKVWGNVGTVEWADPIEDPDPEVMAKVKVLFVRNLANTVTEEILEKAFSQFGKLERVKKLKDYAFIHFDERDGAVKAMEEMNGKDLEGENIEIVFAKPPDQKRKERKAQRQAAKNQMYDDYYYYGPPHMPPPTRGRGRGGRGGYGYPPDYYGYEDYYDYYGYDYHNYRGGYEDPYYGYEDFQVGARGRGGRGARGAAPSRGRGAAPPRGRAGYSQRGGPGSARGVRGARGGAQQQRGRGVRGARGGRGGNVGGKRKADGYNQPDSKRRQTNNQNWGSQPIAQQPLQGGDHSGNYGYKSENQEFYQDTFGQQWK

SEQ ID NO: 100 - protein, 199 aa, Homo sapiens
MKSGLWYFFLFCLRIKVLTGEINGSANYEMFIFHNGGVQILCKYPDIVQQFKMQLLKGGQILCDLTKTKGSGNTVSIKSLKFCHSQLSNNSVSFFLYNLDHSHANYYFCNLSIFDPPPFKVTLTGGYLHIYESQLCCQLKFWLPIGCAAFVVVCILGCILICWLTKKKYSSSVHDPNGEYMFMRAVNTAKKSRLTDVTL

SEQ ID NO: 101 - protein, 1019 aa, Homo sapiens [sequence omitted]

SEQ ID NO: 102 - protein, 325 aa, Homo sapiens
MLPRVGCPALPLPPPPLLPLLLLLLGASGGGGGARAEVLFRCPPCTPERLAACGPPPVAPPAAVAAVAGGARMPCAELVREPGCGCCSVCARLEGEACGVYTPRCGQGLRCYPHPGSELPLQALVMGEGTCEKRRDAEYGASPEQVADNGDDHSEGGLVENHVDSTMNMLGGGGSAGRKPLKSGMKELAVFREKVTEQHRQMGKGGKHHLGLEEPKKLRPPPARTPCQQELDQVLERISTMRLPDERGPLEHLYSLHIPNCDKHGLYNLKQCKMSLNGQRGECWCVNPNTGKLIQGAPTIRGDPECHLFYNEQQEARGVHTQRMQ

SEQ ID NO: 103 - protein, 291 aa, Homo sapiens
MQRARPTLWAAALTLLVLLRGPPVARAGASSAGLGPVVRCEPCDARALAQCAPPPAVCAELVREPGCGCCLTCALSEGQPCGIYTERCGSGLRCQPSPDEARPLQALLDGRGLCVNASAVSRLRAYLLPAPPAPGNASESEEDRSAGSVESPSVSSTHRVSDPKFHPLHSKIIIIKKGHAKDSQRYKVDYESQSTDTQNFSSESKRETEYGPCRREMEDTLNHLKFLNVLSPRGVHIPNCDKKGFYKKKQCRPSKGRKRGFCWCVDKYGQPLPGYTTKGKEDVHCYSMQSK

SEQ ID NO: 104 - protein, 282 aa, Homo sapiens
MERPSLRALLLGAAGLLLLLLPLSSSSSSDTCGPCEPASCPPLPPLGCLLGETRDACGCCPMCARGEGEPCGGGGAGRGYCAPGMECVKSRKRRKGKAGAAAGGPGVSGVCVCKSRYPVCGSDGTTYPSGCQLRAASQRAESRGEKAITQVSKGTCEQGPSIVTPPKDIWNVTGAQVYLSCEVIGIPTPVLIWNKVKRGHYGVQRTELLPGDRDNLAIQTRGGPEKHEVTGWVLVSPLSKEDAGEYECHASNSQGQASASAKITVVDALHEIPVKKGEGAEL

SEQ ID NO: 105 - protein, 1367 aa, Homo sapiens
MKSGSGGGSPTSLWGLLFLSAALSLWPTSGEICGPGIDIRNDYQQLKRLENCTVIEGYLHILLISKAEDYRSYRFPKLTVITEYLLLFRVAGLESLGDLFPNLTVIRGWKLFYNYALVIFEMTNLKDIGLYNLRNITRGAIRIEKNADLCYLSTVDWSLILDAVSNNYIVGNKPPKECGDLCPGTMEEKPMCEKTTINNEYNYRCWTTNRCQKMCPSTCGKRACTENNECCHPECLGSCSAPDNDTACVACRHYYYAGVCVPACPPNTYRFEGWRCVDRDFCANILSAESSDSEGFVIHDGECMQECPSGFIRNGSQSMYCIPCEGPCPKVCEEEKKTKTIDSVTSAQMLQGCTIFKGNLLINIRRGNNIASELENFMGLIEVVTGYVKIRHSHALVSLSFLKNLRLILGEEQLEGNYSFYVLDNQNLQQLWDWDHRNLTIKAGKMYFAFNPKLCVSEIYRMEEVTGTKGRQSKGDINTRNNGERASCESDVLHFTSTTTSKNRIIITWHRYRPPDYRDLISFTVYYKEAPFKNVTEYDGQDACGSNSWNMVDVDLPPNKDVEPGILLHGLKPWTQYAVYVKAVTLTMVENDHIRGAKSEILYIRTNASVPSIPLDVLSASNSSSQLIVKWNPPSLPNGNLSYYIVRWQRQPQDGYLYRHNYCSKDKIPIRKYADGTIDIEEVTENPKTEVCGGEKGPCCACPKTEAEKQAEKEEAEYRKVFENFLHNSIFVPRPERKRRDVMQVANTTMSSRSRNTTAADTYNITDPEELETEYPFFESRVDNKERTVISNLRPFTLYRIDIHSCNHEAEKLGCSASNFVFARTMPAEGADDIPGPVTWEPRPENSIFLKWPEPENPNGLILMYEIKYGSQVEDQRECVSRQEYRKYGGAKLNRLNPGNYTARIQATSLSGNGSWTDPVFFYVQAKTGYENFIHLIIALPVAVLLIVGGLVIMLYVFHRKRNNSRLGNGVLYASVNPEYFSAADVYVPDEWEVAREKITMSRELGQGSFGMVYEGVAKGVVKDEPETRVAIKTVNEAASMRERIEFLNEASVMKEFNCHHVVRLLGVVSQGQPTLVIMELMTRGDLKSYLRSLRPEMENNPVLAPPSLSKMIQMAGEIADGMAYLNANKFVHRDLAARNCMVAEDFTVKIGDFGMTRDIYETDYYRKGGKGLLPVRWMSPESLKDGVFTTYSDVWSFGVVLWEIATLAEQPYQGLSNEQVLRFVMEGGLLDKPDNCPDMLFELMRMCWQYNPKMRPSFLEIISSIKEEMEPGFREVSFYYSEENKLPEPEELDLEPENMESVPLDPSASSSSLPLPDRHSGHKAENGPGPGVLVLRASFDERQPYAHMNGGRKNERALPLPQSSTC

SEQ ID NO: 106 - protein, 2491 aa, Homo sapiens
MGAAAGRSPHLGPAPARRPQRSLLLLQLLLLVAAPGSTQAQAAPFPELCSYTWEAVDTKNNVLYKINICGSVDIVQCGPSSAVCMHDLKTRTYHSVGDSVLRSATRSLLEFNTTVSCDQQGTNHRVQSSIAFLCGKTLGTPEFVTATECVHYFEWRTTAACKKDIFKANKEVPCYVFDEELRKHDLNPLIKLSGAYLVDDSDPDTSLFINVCRDIDTLRDPGSQLRACPPGTAACLVRGHQAFDVGQPRDGLKLVRKDRLVLSYVREEAGKLDFCDGHSPAVTITFVCPSERREGTIPKLTAKSNCRYEIEWITEYACHRDYLESKTCSLSGEQQDVSIDLTPLAQSGGSSYISDGKEYLFYLNVCGETEIQFCNKKQAAVCQVKKSDTSQVKAAGRYHNQTLRYSDGDLTLIYFGGDECSSGFQRMSVINFECNKTAGNDGKGTPVFTGEVDCTYFFTWDTEYACVKEKEDLLCGATDGKKRYDLSALVRHAEPEQNWEAVDGSQTETEKKHFFINICHRVLQEGKARGCPEDAAVCAVDKNGSKNLGKFISSPMKEKGNIQLSYSDGDDCGHGKKIKTNITLVCKPGDLESAPVLRTSGEGGCFYEFEWHTAAACVLSKTEGENCTVFDSQAGFSFDLSPLTKKNGAYKVETKKYDFYINVCGPVSVSPCQPDSGACQVAKSDEKTWNLGLSNAKLSYYDGMIQLNYRGGTPYNNERHTPRATLITFLCDRDAGVGFPEYQEEDNSTYNFRWYTSYACPEEPLECVVTDPSTLEQYDLSSLAKSEGGLGGNWYAMDNSGEHVTWRKYYINVCRPLNPVPGCNRYASACQMKYEKDQGSFTEVVSISNLGMAKTGPVVEDSGSLLLEYVNGSACTTSDGRQTTYTTRIHLVCSRGRLNSHPIFSLNWECVVSFLWNTEAACPIQTTTDTDQACSIRDPNSGFVFNLNPLNSSQGYNVSGIGKIFMFNVCGTMPVCGTILGKPASGCEAETQTEELKNWKPARPVGIEKSLQLSTEGFITLTYKGPLSAKGTADAFIVRFVCNDDVYSGPLKFLHQDIDSGQGIRNTYFEFETALACVPSPVDCQVTDLAGNEYDLTGLSTVRKPWTAVDTSVDGRKRTFYLSVCNPLPYIPGCQGSAVGSCLVSEGNSWNLGVVQMSPQAAANGSLSIMYVNGDKCGNQRFSTRITFECAQISGSPAFQLQDGCEYVFIWRTVEACPVVRVEGDNCEVKDPRHGNLYDLKPLGLNDTIVSAGEYTYYFRVCGKLSSDVCPTSDKSKVVSSCQEKREPQGFHKVAGLLTQKLTYENGLLKMNFTGGDTCHKVYQRSTAIFFYCDRGTQRPVFLKETSDCSYLFEWRTQYACPPFDLTECSFKDGAGNSFDLSSLSRYSDNWEAITGTGDPEHYLINVCKSLAPQAGTEPCPPEAAACLLGGSKPVNLGRVRDGPQWRDGIIVLKYVDGDLCPDGIRKKSTTIRFTCSESQVNSRPMFISAVEDCEYTFAWPTATACPMKSNEHDDCQVTNPSTGHLFDLSSLSGRAGFTAAYSEKGLVYMSICGENENCPPGVGACFGQTRISVGKANKRLRYVDQVLQLVYKDGSPCPSKSGLSYKSVISFVCRPEARPTNRPMLISLDKQTCTLFFSWHTPLACEQATECSVRNGSSIVDLSPLIHRTGGYEAYDESEDDASDTNPDFYINICQPLNPMHGVPCPAGAAVCKVPIDGPPIDIGRVAGPPILNPIANEIYLNFESSTPCLADKHFNYTSLIAFHCKRGVSMGTPKLLRTSECDFVFEWETPVVCPDEVRMDGCTLTDEQLLYSFNLSSLSTSTFKVTRDSRTYSVGVCTFAVGPEQGGCKDGGVCLLSGTKGASFGRLQSMKLDYRHQDEAVVLSYVNGDRCPPETDDGVPCVFPFIFNGKSYEECIIESRAKLWCSTTADYDRDHEWGFCRHSNSYRTSSIIFKCDEDEDIGRPQVFSEVRGCDVTFEWKTKVVCPPKKLECKFVQKHKTYDLRLLSSLTGSWSLVHNGVSYYINLCQKIYKGPLGCSERASICRRTTTGDVQVLGLVHTQKLGVIGDKVVVTYSKGYPCGGNKTASSVIELTCTKTVGRPAFKRFDIDSCTYYFSWDSRAACAVKPQEVQMVNGTITNPINGKSFSLGDIYFKLFRASGDMRTNGDNYLYEIQLSSITSSRNPACSGANICQVKPNDQHFSRKVGTSDKTKYYLQDGDLDVVFASSSKCGKDKTKSVSSTIFFHCDPLVEDGIPEFSHETADCQYLFSWYTSAVCPLGVGFDSENPGDDGQMHKGLSERSQAVGAVLSLLLVALTCCLLALLLYKKERRETVISKLTTCCRRSSNVSYKYSKVNKEEETDENETEWLMEEIQLPPPRQGKEGQENGHITTKSVKALSSLHGDDQDSEDEVLTIPEVKVHSGRGAGAESSHPVRNAQSNALQEREDDRVGLVRGEKARKGKSSSAQQKTVSSTKLVSFHDDSDEDLLHI

SEQ ID NO: 107 - protein, 556 aa, Homo sapiens
MGFWILAILTILMYSTAAKFSKQSWGLENEALIVRCPRQGKPSYTVDWYYSQTNKSIPTQERNRVFASGQLLKFLPAAVADSGIYTCIVRSPTFNRTGYANVTIYKKQSDCNVPDYLMYSTVSGSEKNSKIYCPTIDLYNWTAPLEWFKNCQALQGSRYRAHKSFLVIDNVMTEDAGDYTCKFIHNENGANYSVTATRSFTVKDEQGFSLFPVIGAPAQNEIKEVEIGKNANLTCSACFGKGTQFLAAVLWQLNGTKITDFGEPRIQQEEGQNQSFSNGLACLDMVLRIADVKEEDLLLQYDCLALNLHGLRRHTVRLSRKNPIDHHSIYCIIAVCSVFLMLINVLVIILKMFWIEATLLWRDIAKPYKTRNDGKLYDAYVVYPRNYKSSTDGASRVEHFVHQILPDVLENKCGYTLCIYGRDMLPGEDVVTAVETNIRKSRRHIFILTPQITHNKEFAYEQEVALHCALIQNDAKVILIEMEALSELDMLQAEALQDSLQHLMKVQGTIKWREDHIANKRSLNSKFWKHVRYQMPVPSKIPRKASSLTPLAAQKQ

SEQ ID NO: 108 - protein, 199 aa, Homo sapiens
MNCVCRLVLVVLSLWPDTAVAPGPPPGPPRVSPDPRAELDSTVLLTRSLLADTRQLAAQLRDKFPADGDHNLDSLPTLAMSAGALGALQLPGVLTRLRADLLSYLRHVQWLRRAGGSSLKTLEPELGTLQARLDRLLRRLQLLMSRLALPQPPPDPPAPPLAPPSSAWGGIRAAHAILGGLHLTLDWAVRGLLLLKTRL

SEQ ID NO: 109 - protein, 862 aa, Homo sapiens
MAHTFRGCSLAFMFIITWLLIKAKIDACKRGDVTVKPSHVILLGSTVNITCSLKPRQGCFHYSRRNKLILYKFDRRINFHHGHSLNSQVTGLPLGTTLFVCKLACINSDEIQICGAEIFVGVAPEQPQNLSCIQKGEQGTVACTWERGRDTHLYTEYTLQLSGPKNLTWQKQCKDIYCDYLDFGINLTPESPESNFTAKVTAVNSLGSSSSLPSTFTFLDIVRPLPPWDIRIKFQKASVSRCTLYWRDEGLVLLNRLRYRPSNSRLWNMVNVTKAKGRHDLLDLKPFTEYEFQISSKLHLYKGSWSDWSESLRAQTPEEEPTGMLDVWYMKRHIDYSRQQISLFWKNLSVSEARGKILHYQVTLQELTGGKAMTQNITGHTSWTTVIPRTGNWAVAVSAANSKGSSLPTRINIMNLCEAGLLAPRQVSANSEGMDNILVTWQPPRKDPSAVQEYVVEWRELHPGGDTQVPLNWLRSRPYNVSALISENIKSYICYEIRVYALSGDQGGCSSILGNSKHKAPLSGPHINAITEEKGSILISWNSIPVQEQMGCLLHYRIYWKERDSNSQPQLCEIPYRVSQNSHPINSLQPRVTYVLWMTALTAAGESSHGNEREFCLQGKANWMAFVAPSICIAIIMVGIFSTHYFQQKVFVLLAALRPQWCSREIPDPANSTCAKKYPIAEEKTQLPLDRLLIDWPTPEDPEPLVISEVLHQVTPVFRHPPCSNWPQREKGIQGHQASEKDMMHSASSPPPPRALQAESRQLVDLYKVLESRGSDPKPENPACPWTVLPAGDLPTHDGYLPSNIDDLPSHEAPLADSLEELEPQHISLSVFPSSSLHPLTFSCGDKLTLDQLKMRCDSLML

SEQ ID NO: 110 - protein, 1332 aa, Homo sapiens
MESHSRAGKSRKSAKFRSISRSLMLCNAKTSDDGSSPDEKYPDPFEISLAQGKEGIFHSSVQLADTSEAGPSSVPDLALASEAAQLQAAGNDRGKTCRRIFFMKESSTASSREKPGKLEAQSSNFLFPKACHQRARSNSTSVNPYCTREIDFPMTKKSAAPTDRQPYSLCSNRKSLSQQLDCPAGKAAGTSRPTRSLSTAQLVQPSGGLQASVISNIVLMKGQAKGLGFSIVGGKDSIYGPIGIYVKTIFAGGAAAADGRLQEGDEILELNGESMAGLTHQDALQKFKQAKKGLLTLTVRTRLTAPPSLCSHLSPPLCRSLSSSTCITKDSSSFALESPSAPISTAKPNYRIMVEVSLQKEAGVGLGIGLCSVPYFQCISGIFVHTLSPGSVAHLDGRLRCGDEIVEISDSPVHCLTLNEVYTILSHCDPGPVPIIVSRHPDPQVSEQQLKEAVAQAVENTKFGKERHQWSLEGVKRLESSWHGRPTLEKEREKNSAPPHRRAQKVMIRSSSDSSYMSGSPGGSPGSGSAEKPSSDVDISTHSPSLPLAREPVVLSIASSRLPQESPPLPESRDSHPPLRLKKSFEILVRKPMSSKPKPPPRKYFKSDSDPQKSLEERENSSCSSGHTPPTCGQEARELLPLLLPQEDTAGRSPSASAGCPGPGIGPQTKSSTEGEPGWRRASPVTQTSPIKHPLLKRQARMDYSFDTTAEDPWVRISDCIKNLFSPIMSENHGHMPLQPNASLNEEEGTQGHPDGTPPKLDTANGTPKVYKSADSSTVKKGPPVAPKPAWFRQSLKGLRNRASDPRGLPDPALSTQPAPASREHLGSHIRASSSSSSIRQRISSFETFGSSQLPDKGAQRLSLQPSSGEAAKPLGKHEEGRFSGLLGRGAAPTLVPQQPEQVLSSGSPAASEARDPGVSESPPPGRQPNQKTLPPGPDPLLRLLSTQAEESQGPVLKMPSQRARSFPLTRSQSCETKLLDEKTSKLYSISSQVSSAVMKSLLCLPSSISCAQTPCIPKEGASPTSSSNEDSAANGSAETSALDTGFSLNLSELREYTEGLTEAKEDDDGDHSSLQSGQSVISLLSSEELKKLIEEVKVLDEATLKQLDGIHVTILHKEEGAGLGFSLAGGADLENKVITVHRVFPNGLASQEGTIQKGNEVLSINGKSLKGTTHHDALAILRQAREPRQAVIVTRKLTPEAMPDLNSSTDSAASASAASDVSVESTAEATVCTVTLEKMSAGLGFSLEGGKGSLHGDKPLTINRIFKGAASEQSETVQPGDEILQLGGTAMQGLTRFEAWNIIKALPDGPVTIVIRRKSLQSKETTAAGDS

SEQ ID NO: 111 - protein, 202 aa, Homo sapiens
MLVAGFLLALPPSWAAGAPRAGRRPARPRGCADRPEELLEQLYGRLAAGVLSAFHHTLQLGPREQARNASCPAGGRPADRRFRPPTNLRSVSPWAYRISYDPARYPRYLPEAYCLCRGCLTGLFGEEDVRFRSAPVYMPTVVLRRTPACAGGRSVYTEAYVTIPVGCTCVPEPEKDADSINSSIDKQGAKLLLGPNDAPAGP

SEQ ID NO: 112 - protein, 212 aa, Homo sapiens
MNSFSTSAFGPVAFSLGLLLVLPAAFPAPVPPGEDSKDVAAPHRQPLTSSERIDKQIRYILDGISALRKETCNKSNMCESSKEALAENNLNLPKMAEKDGCFQSGFNEETCLVKIITGLLEFEVYLEYLQNRFESSEEQARAVQMSTKVLIQFLQKKAKNLDAITTPDPTTNASLLTKLQAQNQWLQDMTTHLILRSFKEFLQSSLRALRQM

SEQ ID NO: 113 - protein, 468 aa, Homo sapiens
MLAVGCALLAALLAAPGAALAPRRCPAQEVARGVLTSLPGDSVTLTCPGVEPEDNATVHWVLRKPAAGSHPSRWAGMGRRLLLRSVQLHDSGNYSCYRAGRPAGTVHLLVDVPPEEPQLSCFRKSPLSNVVCEWGPRSTPSLTTKAVLLVRKFQNSPAEDFQEPCQYSQESQKFSCQLAVPEGDSSFYIVSMCVASSVGSKFSKTQTFQGCGILQPDPPANITVTAVARNPRWLSVTWQDPHSWNSSFYRLRFELRYRAERSKTFTTWMVKDLQHHCVIHDAWSGLRHVVQLRAQEEFGQGEWSEWSPEAMGTPWTESRSPPAENEVSTPMQALTTNKDDDNILFRDSANATSLPVQDSSSVPLPTFLVAGGSLAFGTLLCIAIVLRFKKTWKLRALKEGKTSMHPPYSLGQLVPERPRPTPVLVPLISPPVSPSSLGSDNTSSHNRPDARDPRSPYDISNTDYFFPR

SEQ ID NO: 114 - protein, 99 aa, Homo sapiens
MTSKLAVALLAAFLISAALCEGAVLPRSAKELRCQCIKTYSKPFHPKFIKELRVIESGPHCANTEIIVKLSDGRELCLDPKENWVQRVVEKFLKRAENS

SEQ ID NO: 115 - protein, 98 aa, Homo sapiens
MNQTAILICCLIFLTLSGIQGVPLSRTVRCTCISISNQPVNPRSLEKLEIIPASQFCPRVEIIATMKKKGEKRCLNPESKAIKNLLKAVSKERSKRSP

SEQ ID NO: 116 - protein, 1218 aa, Homo sapiens
MRSPRTRGRSGRPLSLLLALLCALRAKVCGASGQFELEILSMQNVNGELQNGNCCGGARNPGDRKCTRDECDTYFKVCLKEYQSRVTAGGPCSFGSGSTPVIGGNTFNLKASRGNDRNRIVLPFSFAWPRSYTLLVEAWDSSNDTVQPDSIIEKASHSGMINPSRQWQTLKQNTGVAHFEYQIRVTCDDYYYGFGCNKFCRPRDDFFGHYACDQNGNKTCMEGWMGPECNRAICRQGCSPKHGSCKLPGDCRCQYGWQGLYCDKCIPHPGCVHGICNEPWQCLCETNWGGQLCDKDLNYCGTHQPCLNGGTCSNTGPDKYQCSCPEGYSGPNCEIAEHACLSDPCHNRGSCKETSLGFECECSPGWTGPTCSTNIDDCSPNNCSHGGTCQDLVNGFKCVCPPQWTGKTCQLDANECEAKPCVNAKSCKNLIASYYCDCLPGWMGQNCDININDCLGQCQNDASCRDLVNGYRCICPPGYAGDHCERDIDECASNPCLNGGHCQNEINRFQCLCPTGFSGNLCQLDIDYCEPNPCQNGAQCYNRASDYFCKCPEDYEGKNCSHLKDHCRTTPCEVIDSCTVAMASNDTPEGVRYISSNVCGPHGKCKSQSGGKFTCDCNKGFTGTYCHENINDCESNPCRNGGTCIDGVNSYKCICSDGWEGAYCETNINDCSQNPCHNGGTCRDLVNDFYCDCKNGWKGKTCHSRDSQCDEATCNNGGTCYDEGDAFKCMCPGGWEGTTCNIARNSSCLPNPCHNGGTCVVNGESFTCVCKEGWEGPICAQNTNDCSPHPCYNSGTCVDGDNWYRCECAPGFAGPDCRININECQSSPCAFGATCVDEINGYRCVCPPGHSGAKCQEVSGRPCITMGSVIPDGAKWDDDCNTCQCLNGRIACSKVWCGPRPCLLHKGHSECPSGQSCIPILDDQCFVHPCTGVGECRSSSLQPVKTKCTSDSYYQDNCANITFTFNKEMMSPGLTTEHICSELRNLNILKNVSAEYSIYIACEPSPSANNEIHVAISAEDIRDDGNPIKEITDKIIDLVSKRDGNSSLIAAVAEVRVQRRPLKNRTDFLVPLLSSVLTVAWICCLVTAFYWCLRKRRKPGSHTHSASEDNTTNNVREQLNQIKNPIEKHGANTVPIKDYENKNSKMSKIRTHNSEVEEDDMDKHQQKARFAKQPAYTLVDREEKPPNGTPTKHPNWTNKQDNRDLESAQSLNRMEYIV

SEQ ID NO: 117 - protein, 1238 aa, Homo sapiens
MRAQGRGRLPRRLLLLLALWVQAARPMGYFELQLSALRNVNGELLSGACCDGDGRTTRAGGCGHDECDTYVRVCLKEYQAKVTPTGPCSYGHGATPVLGGNSFYLPPAGAAGDRARARARAGGDQDPGLVVIPFQFAWPRSFTLIVEAWDWDNDTTPNEELLIERVSHAGMINPEDRWKSLHFSGHVAHLELQIRVRCDENYYSATCNKFCRPRNDFFGHYTCDQYGNKACMDGWMGKECKEAVCKQGCNLLHGGCTVPGECRCSYGWQGRFCDECVPYPGCVHGSCVEPWQCNCETNWGGLLCDKDLNYCGSHHPCTNGGTCINAEPDQYRCTCPDGYSGRNCEKAEHACTSNPCANGGSCHEVPSGFECHCPSGWSGPTCALDIDECASNPCAAGGTCVDQVDGFECICPEQWVGATCQLDANECEGKPCLNAFSCKNLIGGYYCDCIPGWKGINCHINVNDCRGQCQHGGTCKDLVNGYQCVCPRGFGGRHCELERDECASSPCHSGGLCEDLADGFHCHCPQGFSGPLCEVDVDLCEPSPCRNGARCYNLEGDYYCACPDDFGGKNCSVPREPCPGGACRVIDGCGSDAGPGMPGTAASGVCGPHGRCVSQPGGNFSCICDSGFTGTYCHENIDDCLGQPCRNGGTCIDEVDAFRCFCPSGWEGELCDTNPNDCLPDPCHSRGRCYDLVNDFYCACDDGWKGKTCHSREFQCDAYTCSNGGTCYDSGDTFRCACPPGWKGSTCAVAKNSSCLPNPCVNGGTCVGSGASFSCICRDGWEGRTCTHNTNDCNPLPCYNGGICVDGVNWFRCECAPGFAGPDCRINIDECQSSPCAYGATCVDEINGYRCSCPPGRAGPRCQEVIGFGRSCWSRGTPFPHGSSWVEDCNSCRCLDGRRDCSKVWCGWKPCLLAGQPEALSAQCPLGQRCLEKAPGQCLRPPCEAWGECGAEEPPSTPCLPRSGHLDNNCARLTLHFNRDHVPQGTTVGAICSGIRSLPATRAVARDRLLVLLCDRASSGASAVEVAVSFSPARDLPDSSLIQGAAHAIVAAITQRGNSSLLLAVTEVKVETVVTGGSSTGLLVPVLCGAFSVLWLACVVLCVWWTRKRRKERERSRLPREESANNQWAPLNPIRNPIERPGGHKDVLYQCKNFTPPPRRADEALPGPAGHAAVREDEEDEDLGRGEEDSLEAEKFLSHKFTKDPGRSPGRPAHWASGPKVDNRAVRSINEARYAGKE

SEQ ID NO: 118 - protein, 596 aa, Homo sapiens
MPTQRDSSTMSHTVAGGGSGDHSHQVRVKAYYRGDIMITHFEPSISFEGLCNEVRDMCSFDNEQLFTMKWIDEEGDPCTVSSQLELEEAFRLYELNKDSELLIHVFPCVPERPGMPCPGEDKSIYRRGARRWRKLYCANGHTFQAKRFNRRAHCAICTDRIWGLGRQGYKCINCKLLVHKKCHKLVTIECGRHSLPQEPVMPMDQSSMHSDHAQTVIPYNPSSHESLDQVGEEKEAMNTRESGKASSSLGLQDFDLLRVIGRGSYAKVLLVRLKKTDRIYAMKVVKKELVNDDEDIDWVQTEKHVFEQASNHPFLVGLHSCFQTESRLFFVIEYVNGGDLMFHMQRQRKLPEEHARFYSAEISLALNYLHERGIIYRDLKLDNVLLDSEGHIKLTDYGMCKEGLRPGDTTSTFCGTPNYIAPEILRGEDYGFSVDWWALGVLMFEMMAGRSPFDIVGSSDNPDQNTEDYLFQVILEKQIRIPRSLSVKAASVLKSFLNKDPKERLGCHPQTGFADIQGHPFFRNVDWDMMEQKQVVPPFKPNISGEFGLDNFDSQFTNEPVQLTPDDDDIVRKIDQSEFEGFEYINPLLMSAEECV

SEQ ID NO: 119 - protein, 382 aa, Homo sapiens
MRPGTALQAVLLAVLLVGLRAATGRLLSASDLDLRGGQPVCRGGTQRPCYKVIYFHDTSRRLNFEEAKEACRRDGGQLVSIESEDEQKLIEKFIENLLPSDGDFWIGLRRREEKQSNSTACQDLYAWTDGSISQFRNWYVDEPSCGSEVCVVMYHQPSAPAGIGGPYMFQWNDDRCNMKNNFICKYSDEKPAVPSREAEGEETELTTPVLPEETQEEDAKKTFKESREAALNLAYILIPSIPLLLLLVVTTVVCWVWICRKRKREQPDPSTKKQHTIWPSPHQGNSPDLEVYNVIRKQSEADLAETRPDLKNISFRVCSGEATPDDMSCDYDNMAVNPSESGFVTLVSVESGFVTNDIYEFSPDQMGRSKESGWVENEIYGY

SEQ ID NO: 120 - protein, 585 aa, Homo sapiens
MTPPRLFWVWLLVAGTQGVNDGDMRLADGGATNQGRVEIFYRGQWGTVCDNLWDLTDASVVCRALGFENATQALGRAAFGQGSGPIMLDEVQCTGTEASLADCKSLGWLKSNCRHERDAGVVCTNETRSTHTLDLSRELSEALGQIFDSQRGCDLSISVNVQGEDALGFCGHTVILTANLEAQALWKEPGSNVTMSVDAECVPMVRDLLRYFYSRRIDITLSSVKCFHKLASAYGARQLQGYCASLFAILLPQDPSFQMPLDLYAYAVATGDALLEKLCLQFLAWNFEALTQAEAWPSVPTDLLQLLLPRSDLAVPSELALLKAVDTWSWGERASHEEVEGLVEKIRFPMMLPEELFELQFNLSLYWSHEALFQKKTLQALEFHTVPFQLLARYKGLNLTEDTYKPRIYTSPTWSAFVTDSSWSARKSQLVYQSRRGPLVKYSSDYFQAPSDYRYYPYQSFQTPQHPSFLFQDKRVSWSLVYLPTIQSCWNYGFSCSSDELPVLGLTKSGGSDRTIAYENKALMLCEGLFVADVTDFEGWKAAIPSALDTNSSKSTSSFPCPAGHFNGFRTVIRPFYLTNSSGVD

SEQ ID NO: 121 - protein, 433 aa, Homo sapiens
MVWKVAVFLSVALGIGAVPIDDPEDGGKHWVVIVAGSNGWYNYRHQADACHAYQIIHRNGIPDEQIVVMMYDDIAYSEDNPTPGIVINRPNGTDVYQGVPKDYTGEDVTPQNFLAVLRGDAEAVKGIGSGKVLKSGPQDHVFIYFTDHGSTGILVFPNEDLHVKDLNETIHYMYKHKMYRKMVFYIEACESGSMMNHLPDNINVYATTAANPRESSYACYYDEKRSTYLGDWYSVNWMEDSDVEDLTKETLHKQYHLVKSHTNTSHVMQYGNKTISTMKVMQFQGMKRKASSPVPLPPVTHLDLTPSPDVPLTIMKRKLMNTNDLEESRQLTEEIQRHLDARHLIEKSVRKIVSLLAASEAEVEQLLSERAPLTGHSCYPEALLHFRTHCFNWHSPTYEYALRHLYVLVNLCEKPYPLHRIKLSMDHVCLGHY

SEQ ID NO: 122 - protein, 1119 aa, Homo sapiens
MSAPSLRARAAGLGLLLCAVLGRAGRSDSGGRGELGQPSGVAAERPCPTTCRCLGDLLDCSRKRLARLPEPLPSWVARLDLSHNRLSFIKASSMSHLQSLREVKLNNNELETIPNLGPVSANITLLSLAGNRIVEILPEHLKEFQSLETLDLSSNNISELQTAFPALQLKYLYLNSNRVTSMEPGYFDNLANTLLVLKLNRNRISAIPPKMFKLPQLQHLELNRNKIKNVDGLTFQGLGALKSLKMQRNGVTKLMDGAFWGLSNMEILQLDHNNLTEITKGWLYGLLMLQELHLSQNAINRISPDAWEFCQKLSELDLTFNHLSRLDDSSFLGLSLLNTLHIGNNRVSYIADCAFRGLSSLKTLDLKNNEISWTIEDMNGAFSGLDKLRRLILQGNRIRSITKKAFTGLDALEHLDLSDNAIMSLQGNAFSQMKKLQQLHLNTSSLLCDCQLKWLPQWVAENNFQSFVNASCAHPQLLKGRSIFAVSPDGFVCDDFPKPQITVQPETQSAIKGSNLSFICSAASSSDSPMTFAWKKDNELLHDAEMENYAHLRAQGGEVMEYTTILRLREVEFASEGKYQCVISNHFGSSYSVKAKLTVNMLPSFTKTPMDLTIRAGAMARLECAAVGHPAPQIAWQKDGGTDFPAARERRMHVMPEDDVFFIVDVKIEDIGVYSCTAQNSAGSISANATLTVLETPSFLRPLLDRTVTKGETAVLQCIAGGSPPPKLNWTKDDSPLVVTERHFFAAGNQLLIIVDSDVSDAGKYTCEMSNTLGTERGNVRLSVIPTPTCDSPQMTAPSLDDDGWATVGVVIIAVVCCVVGTSLVWVVIIYHTRRRNEDCSITNTDETNLPADIPSYLSSQGTLADRQDGYVSSESGSHHQFVTSSGAGFFLPQHDSSGTCHIDNSSEADVEAATDLFLCPFLGSTGPMYLKGNVYGSDPFETYHTGCSPDPRTVLMDHYEPSYIKKKECYPCSHPSEESCERSFSNISWPSHVRKLLNTSYSHNEGPGMKNLCLNKSSLDFSANPEPASVASSNSFMGTFGKALRRPHLDAYSSFGQPSDCQPRAFYLKAHSSPDLDSGSEEDGKERTDFQEENHICTFKQTLENYRTPNFQSYDLDT

SEQ ID NO: 123 - protein, 956 aa, Homo sapiens
MEKMLAGCFLLILGQIVLLPAEARERSRGRSISRGRHARTHPQTALLESSCENKRADLVFIIDSSRSVNTHDYAKVKEFIVDILQFLDIGPDVTRVGLLQYGSTVKNEFSLKTFKRKSEVERAVKRMRHLSTGTMTGLAIQYALNIAFSEAEGARPLRENVPRVIMIVTDGRPQDSVAEVAAKARDTGILIFAIGVGQVDFNTLKSIGSEPHEDHVFLVANFSQIETLTSVFQKKLCTAHMCSTLEHNCAHFCINIPGSYVCRCKQGYILNSDQTTCRIQDLCAMEDHNCEQLCVNVPGSFVCQCYSGYALAEDGKRCVAVDYCASENHGCEHECVNADGSYLCQCHEGFALNPDKKTCTKIDYCASSNHGCQHECVNTDDSYSCHCLKGFTLNPDKKTCRRINYCALNKPGCEHECVNMEESYYCRCHRGYTLDPNGKTCSRVDHCAQQDHGCEQLCLNTEDSFVCQCSEGFLINEDLKTCSRVDYCLLSDHGCEYSCVNMDRSFACQCPEGHVLRSDGKTCAKLDSCALGDHGCEHSCVSSEDSFVCQCFEGYILREDGKTCRRKDVCQAIDHGCEHICVNSDDSYTCECLEGFRLAEDGKRCRRKDVCKSTHHGCEHICVNNGNSYICKCSEGFVLAEDGRRCKKCTEGPIDLVFVIDGSKSLGEENFEVVKQFVTGIIDSLTISPKAARVGLLQYSTQVHTEFTLRNFNSAKDMKKAVAHMKYMGKGSMTGLALKHMFERSFTQGEGARPLSTRVPRAAIVFTDGRAQDDVSEWASKAKANGITMYAVGVGKAIEEELQEIASEPTNKHLFYAEDFSTMDEISEKLKKGICEALEDSDGRQDSPAGELPKTVQQPTESEPVTINIQDLLSCSNFAVQHRYLFEEDNLLRSTQKLSHSTKPSGSPLEEKHDQCKCENLIMFQNLANEEVRKLTQRLEEMTQRMEALENRLRYR

SEQ ID NO: 124 - protein, 99 aa, Homo sapiens
MKVSAALLCLLLIAATFIPQGLAQPDAINAPVTCCYNFTNRKISVQRLASYRRITSSKCPKEAVIFKTIVAKEICADPKQKWVQDSMDHLDKQTQTPKT

SEQ ID NO: 125 - protein, 99 aa, Homo sapiens
MKASAALLCLLLTAAAFSPQGLAQPVGINTSTTCCYRFINKKIPKQRLESYRRTTSSHCPREAVIFKTKLDKEICADPTQKWVQDFMKHLDKKTQTPKL

SEQ ID NO: 126 - protein, 1390 aa, Homo sapiens
MKAPAVLAPGILVLLFTLVQRSNGECKEALAKSEMNVNMKYQLPNFTAETPIQNVILHEHHIFLGATNYIYVLNEEDLQKVAEYKTGPVLEHPDCFPCQDCSSKANLSGGVWKDNINMALVVDTYYDDQLISCGSVNRGTCQRHVFPHNHTADIQSEVHCIFSPQIEEPSQCPDCVVSALGAKVLSSVKDRFINFFVGNTINSSYFPDHPLHSISVRRLKETKDGFMFLTDQSYIDVLPEFRDSYPIKYVHAFESNNFIYFLTVQRETLDAQTFHTRIIRFCSINSGLHSYMEMPLECILTEKRKKRSTKKEVFNILQAAYVSKPGAQLARQIGASLNDDILFGVFAQSKPDSAEPMDRSAMCAFPIKYVNDFFNKIVNKNNVRCLQHFYGPNHEHCFNRTLLRNSSGCEARRDEYRTEFTTALQRVDLFMGQFSEVLLTSISTFIKGDLTIANLGTSEGRFMQVVVSRSGPSTPHVNFLLDSHPVSPEVIVEHTLNQNGYTLVITGKKITKIPLNGLGCRHFQSCSQCLSAPPFVQCGWCHDKCVRSEECLSGTWTQQICLPAIYKVFPNSAPLEGGTRLTICGWDFGFRRNNKFDLKKTRVLLGNESCTLTLSESTMNTLKCTVGPAMNKHFNMSIIISNGHGTTQYSTFSYVDPVITSISPKYGPMAGGTLLTLTGNYLNSGNSRHISIGGKTCTLKSVSNSILECYTPAQTISTEFAVKLKIDLANRETSIFSYREDPIVYEIHPTKSFISGGSTITGVGKNLNSVSVPRMVINVHEAGRNFTVACQHRSNSEIICCTTPSLQQLNLQLPLKTKAFFMLDGILSKYFDLIYVHNPVFKPFEKPVMISMGNENVLEIKGNDIDPEAVKGEVLKVGNKSCENIHLHSEAVLCTVPNDLLKLNSELNIEWKQAISSTVLGKVIVQPDQNFTGLIAGVVSISTALLLLLGFFLWLKKRKQIKDLGSELVRYDARVHTPHLDRLVSARSVSPTTEMVSNESVDYRATFPEDQFPNSSQNGSCRQVQYPLTDMSPILTSGDSDISSPLLQNTVHIDLSALNPELVQAVQHVVIGPSSLIVHFNEVIGRGHFGCVYHGTLLDNDGKKIHCAVKSLNRITDIGEVSQFLTEGIIMKDFSHPNVLSLLGICLRSEGSPLVVLPYMKHGDLRNFIRNETHNPTVKDLIGFGLQVAKGMKYLASKKFVHRDLAARNCMLDEKFTVKVADFGLARDMYDKEYYSVHNKTGAKLPVKWMALESLQTQKFTTKSDVWSFGVLLWELMTRGAPPYPDVNTFDITVYLLQGRRLLQPEYCPDPLYEVMLKCWHPKAEMRPSFSELVSRISAIFSTFIGEHYVHVNATYVNVKCVAPYPSLLSSEDNADDEVDTRPASFWETS

SEQ ID NO: 127 - protein, 383 aa, Homo sapiens
MGLGPVFLLLAGIFPFAPPGAAAEPHSLRYNLTVLSWDGSVQSGFLTEVHLDGQPFLRCDRQKCRAKPQGQWAEDVLGNKTWDRETRDLTGNGKDLRMTLAHIKDQKEGLHSLQEIRVCEIHEDNSTRSSQHFYYDGELFLSQNLETKEWTMPQSSRAQTLAMNVRNFLKEDAMKTKTHYHAMHADCLQELRRYLKSGVVLRRTVPPMVNVTRSEASEGNITVTCRASGFYPWNITLSWRQDGVSLSHDTQQWGDVLPDGNGTYQTWVATRICQGEEQRFTCYMEHSGNHSTHPVPSGKVLVLQSHWQTFHVSAVAAAAIFVIIIFYVRCCKKKTSAAEGPELVSLQVLDQHPVGTSDHRDATQLGFQPLMSDLGSTGSTEGA

SEQ ID NO: 128 - protein, 383 aa, Homo sapiens [sequence omitted]

SEQ ID NO: 129 - protein, 143 aa, Homo sapiens
MQHRGFLLLTLLALLALTSAVAKKKDKVKKGGPGSECAEWAWGPCTPSSKDCGVGFREGTCGAQTQRIRCRVPCNWKKEFGADCKYKFENWGACDGGTGTKVRQGTLKKARYNAQCQETIRVTKPCTPKTKAKAKAKKGKGKD

SEQ ID NO: 130 - protein, 96 aa, Homo sapiens
MCCTKSLLLAALMSVLLLHLCGESEAASNFDCCLGYTDRILHPKFIVGFTRQLANEGCDINAIIFHTKKKLSVCANPKQTWVKYIVRLLSKKVKNM

SEQ ID NO: 131 - protein, 469 aa, Homo sapiens
MHSFPPLLLLLFWGVVSHSFPATLETQEQDVDLVQKYLEKYYNLKNDGRQVEKRRNSGPVVEKLKQMQEFFGLKVTGKPDAETLKVMKQPRCGVPDVAQFVLTEGNPRWEQTHLTYRIENYTPDLPRADVDHAIEKAFQLWSNVTPLTFTKVSEGQADIMISFVRGDHRDNSPFDGPGGNLAHAFQPGPGIGGDAHFDEDERWTNNFREYNLHRVAAHELGHSLGLSHSTDIGALMYPSYTFSGDVQLAQDDIDGIQAIYGRSQNPVQPIGPQTPKACDSKLTFDAITTIRGEVMFFKDRFYMRTNPFYPEVELNFISVFWPQLPNGLEAAYEFADRDEVRFFKGNKYWAVQGQNVLHGYPKDIYSSFGFPRTVKHIDAALSEENTGKTYFFVANKYWRYDEYKRSMDPGYPKMIAHDFPGIGHKVDAVFMKDGFFYFFHGTRQYKFDPKTKRILTLQKANSWFNCRKN

SEQ ID NO: 132 - protein, 476 aa, Homo sapiens
MMHLAFLVLLCLPVCSAYPLSGAAKEEDSNKDLAQQYLEKYYNLEKDVKQFRRKDSNLIVKKIQGMQKFLGLEVTGKLDTDTLEVMRKPRCGVPDVGHFSSFPGMPKWRKTHLTYRIVNYTPDLPRDAVDSAIEKALKVWEEVTPLTFSRLYEGEADIMISFAVKEHGDFYSFDGPGHSLAHAYPPGPGLYGDIHFDDDEKWTEDASGTNLFLVAAHELGHSLGLFHSANTEALMYPLYNSFTELAQFRLSQDDVNGIQSLYGPPPASTEEPLVPTKSVPSGSEMPAKCDPALSFDAISTLRGEYLFFKDRYFWRRSHWNPEPEFHLISAFWPSLPSYLDAAYEVNSRDTVFIFKGNEFWAIRGNEVQAGYPRGIHTLGFPPTIRKIDAAVSDKEKKKTYFFAADKYWRFDENSQSMEQGFPRLIADDFPGVEPKVDAVLQAFGFFYFFSGSSQFEFDPNARMVTHILKSNSWLHC

SEQ ID NO: 133 - protein, 470 aa, Homo sapiens
MKFLLILLLQATASGALPLNSSTSLEKNNVLFGERYLEKFYGLEINKLPVTKMKYSGNLMKEKIQEMQHFLGLKVTGQLDTSTLEMMHAPRCGVPDVHHFREMPGGPVWRKHYITYRINNYTPDMNREDVDYAIRKAFQVWSNVTPLKFSKINTGMADILVVFARGAHGDFHAFDGKGGILAHAFGPGSGIGGDAHFDEDEFWTTHSGGTNLFLTAVHEIGHSLGLGHSSDPKAVMFPTYKYVDINTFRLSADDIRGIQSLYGDPKENQRLPNPDNSEPALCDPNLSFDAVTTVGNKIFFFKDRFFWLKVSERPKTSVNLISSLWPTLPSGIEAAYEIEARNQVFLFKDDKYWLISNLRPEPNYPKSIHSFGFPNFVKKIDAAVFNPRFYRTYFFVDNQYWRYDERRQMMDPGYPKLITKNFQGIGPKIDAVFYSKNKYYYFFQGSNQFEYDFLLQRITKTLKSNSWFGC

SEQ ID NO: 134 - protein, 471 aa, Homo sapiens
MHPGVLAAFLFLSWTHCRALPLPSGGDEDDLSEEDLQFAERYLRSYYHPTNLAGILKENAASSMTERLREMQSFFGLEVTGKLDDNTLDVMKKPRCGVPDVGEYNVFPRTLKWSKMNLTYRIVNYTPDMTHSEVEKAFKKAFKVWSDVTPLNFTRLHDGIADIMISFGIKEHGDFYPFDGPSGLLAHAFPPGPNYGGDAHFDDDETWTSSSKGYNLFLVAAHEFGHSLGLDHSKDPGALMFPIYTYTGKSHFMLPDDDVQGIQSLYGPGDEDPNPKHPKTPDKCDPSLSLDAITSLRGETMIFKDRFFWRLHPQQVDAELFLTKSFWPELPNRIDAAYEHPSHDLIFIFRGRKFWALNGYDILEGYPKKISELGLPKEVKKISAAVHFEDTGKTLLFSGNQVWRYDDTNHIMDKDYPRLIEEDFPGIGDKVDAVYEKNGYIYFFNGPIQFEYSIWSNRIVRVMPANSILWC

SEQ ID NO: 135 - protein, 477 aa, Homo sapiens
MKSLPILLLLCVAVCSAYPLDGAARGEDTSMNLVQKYLENYYDLKKDVKQFVRRKDSGPVVKKIREMQKFLGLEVTGKLDSDTLEVMRKPRCGVPDVGHFRTFPGIPKWRKTHLTYRIVNYTPDLPKDAVDSAVEKALKVWEEVTPLTFSRLYEGEADIMISFAVREHGDFYPFDGPGNVLAHAYAPGPGINGDAHFDDDEQWTKDTTGTNLFLVAAHEIGHSLGLFHSANTEALMYPLYHSLTDLTRFRLSQDDINGIQSLYGPPPDSPETPLVPTEPVPPEPGTPANCDPALSFDAVSTLRGEILIFKDRHFWRKSLRKLEPELHLISSFWPSLPSGVDAAYEVTSKDLVFIFKGNQFWAIRGNEVRAGYPRGIHTLGFPPTVRKIDAAISDKEKNKTYFFVEDKYWRFDEKRNSMEPGFPKQIAEDFPGIDSKIDAVFEEFGFFYFFTGSSQLEFDPNAKKVTHTLKSNSWLNC

SEQ ID NO: 136 - protein, 707 aa, Homo sapiens
MSLWQPLVLVLLVLGCCFAAPRQRQSTLVLFPGDLRTNLTDRQLAEEYLYRYGYTRVAEMRGESKSLGPALLLLQKQLSLPETGELDSATLKAMRTPRCGVPDLGRFQTFEGDLKWHHHNITYWIQNYSEDLPRAVIDDAFARAFALWSAVTPLTFTRVYSRDADIVIQFGVAEHGDGYPFDGKDGLLAHAFPPGPGIQGDAHFDDDELWSLGKGVVVPTRFGNADGAACHFPFIFEGRSYSACTTDGRSDGLPWCSTTANYDTDDRFGFCPSERLYTQDGNADGKPCQFPFIFQGQSYSACTTDGRSDGYRWCATTANYDRDKLFGFCPTRADSTVMGGNSAGELCVFPFTFLGKEYSTCTSEGRGDGRLWCATTSNFDSDKKWGFCPDQGYSLFLVAAHEFGHALGLDHSSVPEALMYPMYRFTEGPPLHKDDVNGIRHLYGPRPEPEPRPPTTTTPQPTAPPTVCPTGPPTVHPSERPTAGPTGPPSAGPTGPPTAGPSTATTVPLSPVDDACNVNIFDAIAEIGNQLYLFKDGKYWRFSEGRGSRPQGPFLIADKWPALPRKLDSVFEERLSKKLFFFSGRQVWVYTGASVLGPRRLDKLGLGADVAQVTGALRSGRGKMLLFSGRRLWRFDVKAQMVDPRSASEVDRMFPGVPLDTHDVFQYREKAYFCQDRFYWRVSSRSELNQVDQVGYVTYDILQCPED

SEQ ID NO: 137 - protein, 1479 aa, Homo sapiens
MGPGRPAPAPWPRHLLRCVLLLGCLHLGRPGAPGDAALPEPNVFLIFSHGLQGCLEAQGGQVRVTPACNTSLPAQRWKWVSRNRLFNLGTMQCLGTGWPGTNTTASLGMYECDREALNLRWHCRTLGDQLSLLLGARTSNISKPGTLERGDQTRSGQWRIYGSEEDLCALPYHEVYTIQGNSHGKPCTIPFKYDNQWFHGCTSTGREDGHLWCATTQDYGKDERWGFCPIKSNDCETFWDKDQLTDSCYQFNFQSTLSWREAWASCEQQGADLLSITEIHEQTYINGLLTGYSSTLWIGLNDLDTSGGWQWSDNSPLKYLNWESDQPDNPSEENCGVIRTESSGGWQNRDCSIALPYVCKKKPNATAEPTPPDRWANVKVECEPSWQPFQGHCYRLQAEKRSWQESKKACLRGGGDLVSIHSMAELEFITKQIKQEVEELWIGLNDLKLQMNFEWSDGSLVSFTHWHPFEPNNFRDSLEDCVTIWGPEGRWNDSPCNQSLPSICKKAGQLSQGAAEEDHGCRKGWTWHSPSCYWLGEDQVTYSEARRLCTDHGSQLVTITNRFEQAFVSSLIYNWEGEYFWTALQDLNSTGSFFWLSGDEVMYTHWNRDQPGYSRGGCVALATGSAMGLWEVKNCTSFRARYICRQSLGTPVTPELPGPDPTPSLTGSCPQGWASDTKLRYCYKVFSSERLQDKKSWVQAQGACQELGAQLLSLASYEEEHFVANMLNKIFGESEPEIHEQHWFWIGLNRRDPRGGQSWRWSDGVGFSYHNFDRSRHDDDDIRGCAVLDLASLQWVAMQCDTQLDWICKIPRGTDVREPDDSPQGRREWLRFQEAEYKFFEHHSTWAQAQRICTWFQAELTSVHSQAELDFLSHNLQKFSRAQEQHWWIGLHTSESDGRFRWTDGSIINFISWAPGKPRPVGKDKKCVYMTASREDWGDQRCLTALPYICKRSNVTKETQPPDLPTTALGGCPSDWIQFLNKCFQVQGQEPQSRVKWSEAQFSCEQQEAQLVTITNPLEQAFITASLPNVTFDLWIGLHASQRDFQWVEQEPLMYANWAPGEPSGPSPAPSGNKPTSCAVVLHSPSAHFTGRWDDRSCTEETHGFICQKGTDPSLSPSPAALPPAPGTELSYLNGTFRLLQKPLRWHDALLLCESRNASLAYVPDPYTQAFLTQAARGLRTPLWIGLAGEEGSRRYSWVSEEPLNYVGWQDGEPQQPGGCTYVDVDGAWRTTSCDTKLQGAVCGVSSGPPPPRRISYHGSCPQGLADSAWIPFREHCYSFHMELLLGHKEARQRCQRAGGAVLSILDEMENVFVWEHLQSYEGQSRGAWLGMNFNPKGGTLVWQDNTAVNYSNWGPPGLGPSMLSHNSCYWIQSNSGLWRPGACTNITMGVVCKLPRAEQSSFSPSALPENPAALVVVLMAVLLLLALLTAALILYRRRQSIERGAFEGARYSRSSSSPTEATEKNILVSDMEMNEQQE

SEQ ID NO: 138 - protein, 344 aa, Homo sapiens
MAAIYGGVEGGGTRSEVLLVSEDGKILAEADGLSTNHWLIGTDKCVERINEMVNRAKRKAGVDPLVPLRSLGLSLSGGDQEDAGRILIEELRDRFPYLSESYLITTDAAGSIATATPDGGVVLISGTGSNCRLINPDGSESGCGGWGHMMGDEGSAYWIAHQAVKIVFDSIDNLEAAPHDIGYVKQAMFHYFQVPDRLGILTHLYRDFDKCRFAGFCRKIAEGAQQGDPLSRYIFRKAGEMLGRHIVAVLPEIDPVLFQGKIGLPILCVGSVWKSWELLKEGFLLALTQGREIQAQNFFSSFTLMKLRHSSALGGASLGARHIGHLLPMDYSANAIAFYSYTFS

SEQ ID NO: 139 - protein, 128 aa, Homo sapiens; identical to SEQ ID NO: 47

SEQ ID NO: 140 - protein, 1257 aa, Homo sapiens
MVVALRYVWPLLLCSPCLLIQIPEEYEGHHVMEPPVITEQSPRRLVVFPTDDISLKCEASGKPEVQFRWTRDGVHFKPKEELGVTVYQSPHSGSFTITGNNSNFAQRFQGIYRCFASNKLGTAMSHEIRLMAEGAPKWPKETVKPVEVEEGESVVLPCNPPPSAEPLRIYWMNSKILHIKQDERVTMGQNGNLYFANVLTSDNHSDYICHAHFPGTRTIIQKEPIDLRVKATNSMIDRKPRLLFPTNSSSHLVALQGQPLVLECIAEGFPTPTIKWLRPSGPMPADRVTYQNHNKTLQLLKVGEEDDGEYRCLAENSLGSARHAYYVTVEAAPYWLHKPQSHLYGPGETARLDCQVQGRPQPEVTWRINGIPVEELAKDQKYRIQRGALILSNVQPSDTMVTQCEARNRHGLLLANAYIYVVQLPAKILTADNQTYMAVQGSTAYLLCKAFGAPVPSVQWLDEDGTTVLQDERFFPYANGTLGIRDLQANDTGRYFCLAANDQNNVTIMANLKVKDATQITQGPRSTIEKKGSRVTFTCQASFDPSLQPSITWRGDGRDLQELGDSDKYFIEDGRLVIHSLDYSDQGNYSCVASTELDVVESRAQLLVVGSPGPVPRLVLSDLHLLTQSQVRVSWSPAEDHNAPIEKYDIEFEDKEMAPEKWYSLGKVPGNQTSTTLKLSPYVHYTFRVTAINKYGPGEPSPVSETVVTPEAAPEKNPVDVKGEGNETTNMVITWKPLRWMDWNAPQVQYRVQWRPQGTRGPWQEQIVSDPFLVVSNTSTFVPYEIKVQAVNSQGKGPEPQVTIGYSGEDYPQAIPELEGIEILNSSAVLVKWRPVDLAQVKGHLRGYNVTYWREGSQRKHSKRHIHKDHVVVPANTTSVILSGLRPYSSYHLEVQAFNGRGSGPASEFTFSTPEGVPGHPEALHLECQSNTSLLLRWQPPLSHNGVLTGYVLSYHPLDEGGKGQLSFNLRDPELRTHNLTDLSPHLRYRFQLQATTKEGPGEAIVREGGTMALSGISDFGNISATAGENYSVVSWVPKEGQCNFRFHILFKALGEEKGGASLSPQYVSYNQSSYTQWDLQPDTDYEIHLFKERMFRHQMAVKTNGTGRVRLPPAGFATEGWFIGFVSAIILLLLVLLILCFIKRSKGGKYSVKDKEDTQVDSEARPMKDETFGEYRSLESDNEEKAFGSSQPSLNGDIKPLGSDDSLADYGGSVDVQFNEDGSFIGQYSGKKEKEAAGGNDSSGATSPINPAVALE

SEQ ID NO: 141 - protein, 628 aa, Homo sapiens
MGSCARLLLLWGCTVVAAGLSGVAGVSSRCEKACNPRMGNLALGRKLWADTTCGQNATELYCFYSENTDLTCRQPKCDKCNAAYPHLAHLPSAMADSSFRFPRTWWQSAEDVHREKIQLDLEAEFYFTHLIVMFKSPRPAAMVLDRSQDFGKTWKPYKYFATNCSATFGLEDDVVKKGAICTSKYSSPFPCTGGEVIFKALSPPYDTENPYSAKVQEQLKITNLRVQLLKRQSCPCQRNDLNEEPQHFTHYAIYDFIVKGSCFCNGHADQCIPVHGFRPVKAPGTFHMVHGKCMCKHNTAGSHCQHCAPLYNDRPWEAADGKTGAPNECRTCKCNGHADTCHFDVNVWEASGNRSGGVCDDCQHNTEGQYCQRCKPGFYRDLRRPFSAPDACKPCSCHPVGSAVLPANSVTFCDPSNGDCPCKPGVAGRRCDRCMVGYWGFGDYGCRPCDCAGSCDPITGDCISSHTDIDWYHEVPDFRPVHNKSEPAWEWEDAQGFSALLHSGKCECKEQTLGNAKAFCGMKYSYVLKIKILSAHDKGTHVEVNVKIKKVLKSTKLKIFRGKRTLYPESWTDRGCTCPILNPGLEYLVAGHEDIRTGKLIVNMKSFVQHWKPSLGRKVMDILKRECK

SEQ ID NO: 142 - protein, 257 aa, Homo sapiens
MSILFYVIFLAYLRGIQGNNMDQRSLPEDSLNSLIIKLIQADILKNKLSKQMVDVKENYQSTLPKAEAPREPERGGPAKSAFQPVIAMDTELLRQQRRYNSPRVLLSDSTPLEPPPLYLMEDYVGSPVVANRTSRRKRYAEHKSHRGEYSVCDSESLWVTDKSSAIDIRGHQVTVLGEIKTGNSPVKQYFYETRCKEARPVKNGCRGIDDKHWNSQCKTSQTYVRALTSENNKLVGWRWIRIDTSCVCALSRKIGRT

SEQ ID NO: 143 - protein, 1375 aa, Homo sapiens
MEGDRVAGRPVLSSLPVLLLLPLLMLRAAALHPDELFPHGESWGDQLLQEGDDESSAVVKLANPLHFYEARFSNLYVGTNGIISTQDFPRETQYVDYDFPTDFPAIAPFLADIDTSHGRGRVLYREDTSPAVLGLAARYVRAGFPRSARFTPTHAFLATWEQVGAYEEVKRGALPSGELNTFQAVLASDGSDSYALFLYPANGLQFLGTRPKESYNVQLQLPARVGFCRGEADDLKSEGPYFSLTSTEQSVKNLYQLSNLGIPGVWAFHIGSTSPLDNVRPAAVGDLSAAHSSVPLGRSFSHATALESDYNEDNLDYYDVNEEEAEYLPGEPEEALNGHSSIDVSFQSKVDTKPLEESSTLDPHTKEGTSLGEVGGPDLKGQVEPWDERETRSPAPPEVDRDSLAPSWETPPPYPENGSIQPYPDGGPVPSEMDVPPAHPEEEIVLRSYPASGHTTPLSRGTYEVGLEDNIGSNTEVFTYNAANKETCEHNHRQCSRHAFCTDYATGFCCHCQSKFYGNGKHCLPEGAPHRVNGKVSGHLHVGHTPVHFTDVDLHAYIVGNDGRAYTAISHIPQPAAQALLPLTPIGGLFGWLFALEKPGSENGFSLAGAAFTHDMEVTFYPGEETVRITQTAEGLDPENYLSIKTNIQGQVPYVSANFTAHISPYKELYHYSDSTVTSTSSRDYSLTFGAINQTWSYRIHQNITYQVCRHAPRHPSFPTTQQLNVDRVFALYNDEERVLRFAVTNQIGPVKEDSDPTPGNPCYDGSHMCDTTARCHPGTGVDYTCECASGYQGDGRNCVDENECATGFHRCGPNSVCINLPGSYRCECRSGYEFADDRHTCILITPPANPCEDGSHTCAPAGQARCVHHGGSTFSCACLPGYAGDGHQCTDVDECSENRCHPAATCYNTPGSFSCRCQPGYYGDGFQCIPDSTSSLTPCEQQQRHAQAQYAYPGARFHIPQCDEQGNFLPLQCHGSTGFCWCVDPDGHEVPGTQTPPGSTPPHCGPSPEPTQRPPTICERWRENLLEHYGGTPRDDQYVPQCDDLGHFIPLQCHGKSDFCWCVDKDGREVQGTRSQPGTTPACIPTVAPPMVRPTPRPDVTPPSVGTFLLYTQGQQIGYLPLNGTRLQKDAAKTLLSLHGSIIVGIDYDCRERMVYWTDVAGRTISRAGLELGAEPETIVNSGLISPEGLAIDHIRRTMYWTDSVLDKIESALLDGSERKVLFYTDLVNPRAIAVDPIRGNLYWTDWNREAPKIETSSLDGENRRILINTDIGLPNGLTFDPFSKLLCWADAGTKKLECTLPDGTGRRVIQNNLKYPFSIVSYADHFYHTDWRRDGVVSVNKHSGQFTDEYLPEQRSHLYGITAVYPYCPTGRK

SEQ ID NO: 144 - protein, 304 aa, Homo sapiens
MSSTLPALLCVGLCLSQRISAQQQTLPKPFIWAEPHFMVPKEKQVTICCQGNYGAVEYQLHFEGSLFAVDRPKPPERINKVKFYIPDMNSRMAGQYSCIYRVGELWSEPSNLLDLVVTEMYDTPTLSVHPGPEVISGEKVTFYCRLDTATSMFLLLKEGRSSHVQRGYGKVQAEFPLGPVTTAHRGTYRCFGSYNNHAWSFPSEPVKLLVTGDIENTSLAPEDPTFPADTWGTYLLTTETGLQKDHALWDHTAQNLLRMGLAFLVLVALVWFLVEDWLSRKRTRERASRASTWEGRRRLNTQTL

SEQ ID NO: 145 - protein, 473 aa, Homo sapiens
MKRASAGGSRLLAWVLWLQAWQVAAPCPGACVCYNEPKVTTSCPQQGLQAVPVGIPAASQRIFLHGNRISHVPAASFRACRNLTILWLHSNVLARIDAAAFTGLALLEQLDLSDNAQLRSVDPATFHGLGRLHTLHLDRCGLQELGPGLFRGLAALQYLYLQDNALQALPDDTFRDLGNLTHLFLHGNRISSVPERAFRGLHSLDRLLLHQNRVAHVHPHAFRDLGRLMTLYLFANNLSALPTEALAPLRALQYLRLNDNPWVCDCRARPLWAWLQKFRGSSSEVPCSLPQRLAGRDLKRLAANDLQGCAVATGPYHPIWTGRATDEEPLGLPKCCQPDAADKASVLEPGRPASAGNALKGRVPPGDSPPGNGSGPRHINDSPFGTLPGSAEPPLTAVRPEGSEPPGFPTSGPRRRPGCSRKNRTRSHCRLGQAGSGGGGTGDSEGSGALPSLTCSLTPLGLALVLWTVLGPC

SEQ ID NO: 146 - protein, 357 aa, Homo sapiens
MQSVQSTSFCLRKQCLCLTFLLLHLLGQVAATQRCPPQCPGRCPATPPTCAPGVRAVLDGCSCCLVCARQRGESCSDLEPCDESSGLYCDRSADPSNQTGICTAVEGDNCVFDGVIYRSGEKFQPSCKFQCTCRDGQIGCVPRCQLDVLLPEPNCPAPRKVEVPGECCEKWICGPDEEDSLGGLTLAAYRPEATLGVEVSDSSVNCIEQTTEWTACSKSCGMGFSTRVTNRNRQCEMLKQTRLCMVRPCEQEPEQPTDKKGKKCLRTKKSLKAIHLQFKNCTSLHTYKPRFCGVCSDGRCCTPHNTKTIQAEFQCSPGQIVKKPVMVIGTCTCHTNCPKNNEAFLQELELKTTRGKM

SEQ ID NO: 147 - protein, 923 aa, Homo sapiens
MERGLPLLCAVLALVLAPAGAFRNDKCGDTIKIESPGYLTSPGYPHSYHPSEKCEWLIQAPDPYQRIMINFNPHFDLEDRDCKYDYVEVFDGENENGHFRGKFCGKIAPPPVVSSGPFLFIKFVSDYETHGAGFSIRYEIFKRGPECSQNYTTPSGVIKSPGFPEKYPNSLECTYIVFVPKMSEIILEFESFDLEPDSNPPGGMFCRYDRLEIWDGFPDVGPHIGRYCGQKTPGRIRSSSGILSMVFYTDSAIAKEGFSANYSVLQSSVSEDFKCMEALGMESGEIHSDQITASSQYSTNWSAERSRLNYPENGWTPGEDSYREWIQVDLGLLRFVTAVGTQGAISKETKKKYYVKTYKIDVSSNGEDWITIKEGNKPVLFQGNTNPTDVVVAVFPKPLITRFVRIKPATWETGISMRFEVYGCKITDYPCSGMLGMVSGLISDSQITSSNQGDRNWMPENIRLVTSRSGWALPPAPHSYINEWLQIDLGEEKIVRGIIIQGGKHRENKVFMRKFKIGYSNNGSDWKMIMDDSKRKAKSFEGNNNYDTPELRTFPALSTRFIRIYPERATHGGLGLRMELLGCEVEAPTAGPTTPNGNLVDECDDDQANCHSGTGDDFQLTGGTTVLATEKPTVIDSTIQSEFPTYGFNCEFGWGSHKTFCHWEHDNHVQLKWSVLTSKTGPIQDHTGDGNFIYSQADENQKGKVARLVSPVVYSQNSAHCMTFWYHMSGSHVGTLRVKLRYQKPEEYDQLVWMAIGHQGDHWKEGRVLLHKSLKLYQVIFEGEIGKGNLGGIAVDDISINNHISQEDCAKPADLDKKNPEIKIDETGSTPGYEGEGEGDKNISRKPGNVLKTLDPILITIIAMSALGVLLGAVCGVVLYCACWHNGMSERNLSALENYNFELVDGVKLKKDKLNTQSTYSEA

SEQ ID NO: 148 - protein, 637 aa, Homo sapiens
MHLRIHARRSPPRRPAWTLGIWFLFWGCIVSSVWSSSNVASSSSTSSSPGSHSQHEHHFHGSKHHSVPISIYRSPVSLRGGHAGATYIFGKSGGLILYTWPANDRPSTRSDRLAVGFSTTVKDGILVRIDSAPGLGDFLQLHIEQGKIGVVFNIGTVDISIKEERTPVNDGKYHVVRFTRNGGNATLQVDNWPVNEHYPTGRQLTIFNTQAQIAIGGKDKGRLFQGQLSGLYYDGLKVLNMAAENNPNIKINGSVRLVGEVPSILGTTQTTSMPPEMSTTVMETTTTMATTTTRKNRSTASIQPTSDDLVSSAECSSDDEDFVECEPSTGGELVIPLLVEDPLATPPIATRAPSITLPPTFRPLLTIIETTKDSLSMTSEAGLPCLSDQGSDGCDDDGLVISGYGSGETFDSNLPPTDDEDFYTTFSLVTDKSLSTSIFEGGYKAHAPKWESKDFRPNKVSETSRTTTTSLSPELIRFTASSSSGMVPKLPAGKMNNRDLKPQPDIVLLPLPTAYELDSTKLKSPLITSPMFRNVPTANPTEPGIRRVPGASEVIRESSSTTGMVVGIVAAAALCILILLYAMYKYRNRDEGSYQVDETRNYISNSAQSNGTLMKEKQQSSKSGHKKQKNKDREYYV

SEQ ID NO: 149 - protein, 271 aa, Homo sapiens
MQAACWYVLFLLQPTVYLVTCANLTNGGKSELLKSGSSKSTLKHIWTESSKDLSISRLLSQTFRGKENDTDLDLRYDTPEPYSEQDLWDWLRNSTDLQEPRPRAKRRPIVKTGKFKKMFGWGDFHSNIKTVKLNLLITGKIVDHGNGTFSVYFRHNSTGQGNVSVSLVPPTKIVEFDLAQQTVIDAKDSKSFNCRIEYEKVDKATKNTLCNYDPSKTCYQEQTQSHVSWLCSKPFKVICIYISFYSTDYKLVQKVCPDYNYHSDTPYFPSG

SEQ ID NO: 150 - protein, 421 aa, Homo sapiens
MGFLSPIYVIFFFFGVKVHCQYETYQWDEDYDQEPDDDYQTGFPFRQNVDYGVPFHQYTLGCVSECFCPTNFPSSMYCDNRKLKTIPNIPMHIQQLYLQFNEIEAVTANSFINATHLKEINLSHNKIKSQKIDYGVFAKLPNLLQLHLEHNNLEEFPFPLPKSLERLLLGYNEISKLQTNAMDGLVNLTMLDLCYNYLHDSLLKDKIFAKMEKLMQLNLCSNRLESMPPGLPSSLMYLSLENNSISSIPEKYFDKLPKLHTLRMSHNKLQDIPYNIFNLPNIVELSVGHNKLKQAFYIPRNLEHLYLQNNEIEKMNLTVMCPSIDPLHYHHLTYIRVDQNKLKEPISSYIFFCFPHIHTIYYGEQRSTNGQTIQLKTQVFRRFPDDDDESEDHDDPDNAHESPEQEGAEGHFDLHYYENQE

SEQ ID NO: 151 - protein, 303 aa, Homo sapiens
MRAWIFFLLCLAGRALAAPQQEALPDETEVVEETVAEVTEVSVGANPVQVEVGEFDDGAEETEEEVVAENPCQNHHCKHGKVCELDENNTPMCVCQDPTSCPAPIGEFEKVCSNDNKTFDSSCHFFATKCTLEGTKKGHKLHLDYIGPCKYIPPCLDSELTEFPLRMRDWLKNVLVTLYERDEDNNLLTEKQKLRVKKIHENEKRLEAGDHPVELLARDFEKNYNMYIFPVHWQFGQLDQHPIDGYLSHTELAPLRAPLIPMEHCTTRFFETCDLDNDKYIALDEWAGCFGIKQKDIDKDLVI

SEQ ID NO: 152 - protein, 402 aa, Homo sapiens [sequence omitted]

SEQ ID NO: 153 - protein, 189 aa, Homo sapiens
MASKRALVILAKGAEEMETVIPVDVMRRAGIKVTVAGLAGKDPVQCSRDVVICPDASLEDAKKEGPYDVVVLPGGNLGAQNLSESAAVKEILKEQENRKGLIAAICAGPTALLAHEIGFGSKVTTHPLAKDKMMNGGHYTYSENRVEKDGLILTSRGPGTSFEFALAIVEALNGKEVAAQVKAPLVLKD

SEQ ID NO: 154 - protein, 785 aa, Homo sapiens
MPKGRQKVPHLDAPLGLPTCLWLELAGLFLLVPWVMGLAGTGGPDGQGTGGPSWAVHLESLEGDGEEETLEQQADALAQAAGLVNAGRIGELQGHYLFVQPAGHRPALEVEAIRQQVEAVLAGHEAVRWHSEQRLLRRAKRSVHFNDPKYPQQWHLNNRRSPGRDINVTGVWERNVTGRGVTVVVVDDGVEHTIQDIAPNYSPEGSYDLNSNDPDPMPHPDVENGNHHGTRCAGEIAAVPNNSFCAVGVAYGSRIAGIRVLDGPLTDSMEAVAFNKHYQINDIYSCSWGPDDDGKTVDGPHQLGKAALQHGVIAGRQGFGSIFVVASGNGGQHNDNCNYDGYANSIYTVTIGAVDEEGRMPFYAEECASMLAVTFSGGDKMLRSIVTTDWDLQKGTGCTEGHTGTSAAAPLAAGMIALMLQVRPCLTWRDVQHIIVFTATRYEDRRAEWVTNEAGFSHSHQHGFGLLNAWRLVNAAKIWTSVPYLASYVSPVLKENKAIPQSPRSLEVLWNVSRMDLEMSGLKTLEHVAVTVSITHPRRGSLELKLFCPSGMMSLIGAPRSMDSDPNGFNDWTFSTVRCWGERARGTYRLVIRDVGDESFQVGILRQWQLTLYGSVWSAVDIRDRQRLLESAMSGKYLHDDFALPCPPGLKIPEEDGYTITPNTLKTLVLVGCFTVFWTVYYMLEVYLSQRNVASNQVCRSGPCHWPHRSRKAKEEGTELESVPLCSSKDPDEVETESRGPPTTSDLLAPDLLEQGDWSLSQNKSALDCPHQHLDVPHGKEEQIC

SEQ ID NO: 155 - protein, 933 aa, Homo sapiens
MAASRLDFGEVETFLDRHPELFEDYLMRKGKQEMVEKWLQRHSQGQGALGPRPSLAGTSSLAHSTCRGGSSVGGGTGPNGSAHSQPLPGGGDCGGVPLSPSWAGGSRGDGNLQRRASQKELRKSFARSKAIHVNRTYDEQVTSRAQEPLSSVRRRALLRKASSLPPTTAHILSALLESRVNLPRYPPTAIDYKCHLKKHNERQFFLELVKDISNDLDLTSLSYKILIFVCLMVDADRCSLFLVEGAAAGKKTLVSKFFDVHAGTPLLPCSSTENSNEVQVPWGKGIIGYVGEHGETVNIPDAYQDRRFNDEIDKLTGYKTKSLLCMPIRSSDGEIIGVAQAINKIPEGAPFTEDDEKVMQMYLPFCGIAISNAQLFAASRKEYERSRALLEVVNDLFEEQTDLEKIVKKIMHRAQTLLKCERCSVLLLEDIESPVVKFTKSFELMSPKCSADAENSFKESMEKSSYSDWLINNSIAELVASTGLPVNISDAYQDPRFDAEADQISGFHIRSVLCVPIWNSNHQIIGVAQVLNRLDGKPFDDADQRLFEAFVIFCGLGINNTIMYDQVKKSWAKQSVALDVLSYHATCSKAEVDKFKAANIPLVSELAIDDIHFDDFSLDVDAMITAALRMFMELGMVQKFKIDYETLCRWLLTVRKNYRMVLYHNWRHAFNVCQLMFAMLTTAGFQDILTEVEILAVIVGCLCHDLDHRGTNNAFQAKSGSALAQLYGTSATLEHHHFNHAVMILQSEGHNIFANLSSKEYSDLMQLLKQSILATDLTLYFERRTEFFELVSKGEYDWNIKNHRDIFRSMLMTACDLGAVTKPWEISRQVAELVTSEFFEQGDRERLELKLTPSAIFDRNRKDELPRLQLEWIDSICMPLYQALVKVNVKLKPMLDSVATNRSKWEELHQKRLLASTASSSPASVMVAKEDRN

SEQ ID NO: 156 - protein, 211 aa, Homo sapiens [sequence omitted]

SEQ ID NO: 157 - protein, 241 aa, Homo sapiens
MNRCWALFLSLCCYLRLVSAEGDPIPEELYEMLSDHSIRSFDDLQRLLHGDPGEEDGAELDLNMTRSHSGGELESLARGRRSLGSLTIAEPAMIAECKTRTEVFEISRRLIDRTNANFLVWPPCVEVQRCSGCCNNRNVQCRPTQVQLRPVQVRKIEIVRKKPIFKKATVTLEDHLACKCETVAAARPVTRSPGGSQEQRAKTPQTRVTIRTVRVRRPPKGKHRKFKHTHDKTALKETLGA

SEQ ID NO: 158 - protein, 223 aa, Homo sapiens [sequence omitted]

SEQ ID NO: 159 - protein, 558 aa, Homo sapiens
MAALTRDPQFQKLQQWYREHRSELNLRRLFDANKDRFNHFSLTLNTNHGHILVDYSKNLVTEDVMRMLVDLAKSRGVEAARERMFNGEKINYTEGRAVLHVALRNRSNTPILVDGKDVMPEVNKVLDKMKSFCQRVRSGDWKGYTGKTITDVINIGIGGSDLGPLMVTEALKPYSSGGPRVWYVSNIDGTHIAKTLAQLNPESSLFIIASKTFTTQETITNAETAKEWFLQAAKDPSAVAKHFVALSTNTTKVKEFGIDPQNMFEFWDWVGGRYSLWSAIGLSIALHVGFDNFEQLLSGAHWMDQHFRTTPLEKNAPVLLALLGIWYINCFGCETHAMLPYDQYLHRFAAYFQQGDMESNGKYITKSGTRVDHQTGPIVWGEPGTNGQHAFYQLIHQGTKMIPCDFLIPVQTQHPIRKGLHHKILLANFLAQTEALMRGKSTEEARKELQAAGKSPEDLERLLPHKVFEGNRPTNSIVFTKLTPFMLGALVAMYEHKIFVQGIIWDINSFDQWGVELGKQLAKKIEPELDGSAQVTSHDASTNGLINFIKQQREARVQ

SEQ ID NO: 160 - protein, 398 aa, Homo sapiens
MNWHLPLFLLASVTLPSICSHFNPLSLEELGSNTGIQVFNQIVKSRPHDNIVISPHGIASVLGMLQLGADGRTKKQLAMVMRYGVNGVGKILKKINKAIVSKKNKDIVTVANAVFVKNASEIEVPFVTRNKDVFQCEVRNVNFEDPASACDSINAWVKNETRDMIDNLLSPDLIDGVLTRLVLVNAVYFKGLWKSRFQPENTKKRTFVAADGKSYQVPMLAQLSVFRCGSTSAPNDLWYNFIELPYHGESISMLIALPTESSTPLSAIIPHISTKTIDSWMSIMVPKRVQVILPKFTAVAQTDLKEPLKVLGITDMFDSSKANFAKITTGSENLHVSHILQKAKIEVSEDGTKASAATTAILIARSSPPWFIVDRPFLFFIRHNPTGAVLFMGQINKP

SEQ ID NO: 161 - protein, 324 aa, Homo sapiens
MPELAVQKVVVHPLVLLSVVDHFNRIGKVGNQKRVVGVLLGSWQKKVLDVSNSFAVPFDEDDKDDSVWFLDHDYLENMYGMFKKVNARERIVGWYHTGPKLHKNDIAINELMKRYCPNSVLVIIDVKPKDLGLPTEAYISVEEVHDDGTPTSKTFEHVTSEIGAEEAEEVGVEHLLRDIKDTTVGTLSQRITNQVHGLKGLNSKLLDIRSYLEKVATGKLPINHQIIYQLQDVFNLLPDVSLQEFVKAFYLKTNDQMVVVYLASLIRSVVALHNLINNKIANRDAEKKEGQEKEESKKDRKEDKEKDKDKEKSDVKKEEKKEKK

SEQ ID NO: 162 - protein, 177 aa, Homo sapiens
MQRRLVQQWSVAVFLLSYAVPSCGRSVEGLSRRLKRAVSEHQLLHDKGKSIQDLRRRFFLHHLIAEIHTAEIRATSEVSPNSKPSPNTKNHPVRFGSDDEGRYLTQETNKVETYKEQPLKTPGKKKKGKPGKRKEQEKKKRRTRSAWLDSGVTGSGLEGDHLSDTSTTSLELDSRRH

SEQ ID NO: 163 - protein, 192 aa, Homo sapiens
MQAIKCVVVGDGAVGKTCLLISYTTNAFPGEYIPTVFDNYSANVMVDGKPVNLGLWDTAGQEDYDRLRPLSYPQTDVFLICFSLVSPASFENVRAKWYPEVRHHCPNTPIILVGTKLDLRDDKDTIEKLKEKKLTPITYPQGLAMAKEIGAVKYLECSALTQRGLKTVFDEAIRAVLCPPPVKKRKRKCLLL

SEQ ID NO: 164 - protein, 91 aa, Homo sapiens
MKVSAAALAVILIATALCAPASASPYSSDTTPCCFAYIARPLPRAHIKEYFYTSGKCSNPAVVFVTRKNRQVCANPEKKWVREYINSLEMS

SEQ ID NO: 165 - protein, 357 aa, Homo sapiens
MAPRRVRSFLRGLPALLLLLLFLGPWPAASHGGKYSREKNQPKPSPKRESGEEFRMEKLNQLWEKAQRLHLPPVRLAELHADLKIQERDELAWKKLKLDGLDEDGEKEARLIRNLNVILAKYGLDGKKDARQVTSNSLSGTQEDGLDDPRLEKLWHKAKTSGKFSGEELDKLWREFLHHKEKVHEYNVLLETLSRTEEIHENVISPSDLSDIKGSVLHSRHTELKEKLRSINQGLDRLRRVSHQGYSTEAEFEEPRVIDLWDLAQSANLTDKELEAFREELKHFEAKIEKHNHYQKQLEIAHEKLRHAESVGDGERVSRSREKHALLEGRTKELGYTVKKHLQDLSGRISRARHNEL

SEQ ID NO: 166 - protein, 437 aa, Homo sapiens
MGLRAAPSSAAAAAAEVEQRRSPGLCPPPLELLLLLLFSLGLLHAGDCQQPAQCRIQKCTTDFVSLTSHLNSAVDGFDSEFCKALRAYAGCTQRTSKACRGNLVYHSAVLGISDLMSQRNCSKDGPTSSTNPEVTHDPCNYHSHAGAREHRRGDQNPPSYLFCGLFGDPHLRTFKDNFQTCKVEGAWPLIDNNYLSVQVTNVPVVPGSSATATNKITIIFKAHHECTDQKVYQAVTDDLPAAFVDGTTSGGDSDAKSLRIVERESGHYVEMHARYIGTTVFVRQVGRYLTLAIRMPEDLAMSYEESQDLQLCVNGCPLSERIDDGQGQVSAILGHSLPRTSLVQAWPGYTLETANTQCHEKMPVKDIYFQSCVFDLLTTGDANFTAAAHSALEDVEALHPRKERWHIFPSSGNGTPRGGSDLSVSLGLTCLILIVFL

SEQ ID NO: 167 - protein, 1378 aa, Homo sapiens
MSLLMFTQLLLCGFLYVRVDGSRLRQEDFPPRIVEHPSDVIVSKGEPTTLNCKAEGRPTPTIEWYKDGERVETDKDDPRSHRMLLPSGSLFFLRIVHGRRSKPDEGSYVCVARNYLGEAVSRNASLEVALLRDDFRQNPTDVVVAAGEPAILECQPPRGHPEPTIYWKKDKVRIDDKEERISIRGGKLMISNTRKSDAGMYTCVGTNMVGERDSDPAELTVFERPTFLRRPINQVVLEEEAVEFRCQVQGDPQPTVRWKKDDADLPRGRYDIKDDYTLRIKKTMSTDEGTYMCIAENRVGKMEASATLTVRAPPQFVVRPRDQIVAQGRTVTFPCETKGNPQPAVFWQKEGSQNLLFPNQPQQPNSRCSVSPTGDLTITNIQRSDAGYYICQALTVAGSILAKAQLEVTDVLTDRPPPIILQGPANQTLAVDGTALLKCKATGDPLPVISWLKEGFTFPGRDPRATIQEQGTLQIKNLRISDTGTYTCVATSSSGETSWSAVLDVTESGATISKNYDLSDLPGPPSKPQVTDVTKNSVTLSWQPGTPGTLPASAYIIEAFSQSVSNSWQTVANHVKTTLYTVRGLRPNTIYLFMVRAINPQGLSDPSPMSDPVRTQDISPPAQGVDHRQVQKELGDVLVRLHNPVVLTPTTVQVTWTVDRQPQFIQGYRVMYRQTSGLQATSSWQNLDAKVPTERSAVLVNLKKGVTYEIKVRPYFNEFQGMDSESKTVRTTEEAPSAPPQSVTVLTVGSYNSTSISVSWDPPPPDHQNGIIQEYKIWCLGNETRFHINKTVDAAIRSVIIGGLFPGIQYRVEVAASTSAGVGVKSEPQPIIIGRRNEVVITENNNSITEQITDVVKQPAFIAGIGGACWVILMGFSIWLYWRRKKRKGLSNYAVTFQRGDGGLMSNGSRPGLLNAGDPSYPWLADSWPATSLPVNNSNSGPNEIGNFGRGDVLPPVPGQGDKTATMLSDGAIYSSIDFTTKTSYNSSSQITQATPYATTQILHSNSIHELAVDLPDPQWKSSIQQKTDLMGFGYSLPDQNKGNNGGKGGKKKKNKNSSKPQKNNGSTWANVPLPPPPVQPLPGTELEHYAVEQQENGYDSDSWCPPLPVQTYLHQGLEDELEEDDDRVPTPPVRGVASSPAISFGQQSTATLTPSPREEMQPMLQAHLDELTRAYQFDIAKQTWHIQSNNQPPQPPVPPLGYVSGALISDLETDVADDDADDEEEALEIPRPLRALDQTPGSSMDNLDSSVTGKAFTSSQRPRPTSPFSTDSNTSAALSQSQRPRPTKKHKGGRMDQQPALPHRREGMTDEEALVPYSKPSFPSPGGHSSSGTASSKGSTGPRKTEVLRAGHQRNASDLLDIGYMGSNSQGQFTGEL

SEQ ID NO: 168 - protein, 937 aa, Homo sapiens
MHRPRRRGTRPPLLALLAALLLAARGAAAQETELSVSAELVPTSSWNISSELNKDSYLTLDEPMNNITTSLGQTAELHCKVSGNPPPTIRWFKNDAPVVQEPRRLSFRSTIYGSRLRIRNLDTTDTGYFQCVATNGKEVVSSTGVLFVKFGPPPTASPGYSDEYEEDGFCQPYRGIACARFIGNRTVYMESLHMQGEIENQITAAFTMIGTSSHLSDKCSQFAIPSLCHYAFPYCDETSSVPKPRDLCRDECEILENVLCQTEYIFARSNPMILMRLKLPNCEDLPQPESPEAANCIRIGIPMADPINKNHKCYNSTGVDYRGTVSVTKSGRQCQPWNSQYPHTHTFTALRFPELNGGHSYCRNPGNQKEAPWCFTLDENFKSDLCDIPACDSKDSKEKNKMEILYILVPSVAIPLAIALLFFFICVCRNNQKSSSAPVQRQPKHVRGQNVEMSMLNAYKPKSKAKELPLSAVRFMEELGECAFGKIYKGHLYLPGMDHAQLVAIKTLKDYNNPQQWTEFQQEASLMAELHHPNIVCLLGAVTQEQPVCMLFEYINQGDLHEFLIMRSPHSDVGCSSDEDGTVKSSLDHGDFLHIAIQIAAGMEYLSSHFFVHKDLAARNILIGEQLHVKISDLGLSREIYSADYYRVQSKSLLPIRWMPPEAIMYGKFSSDSDIWSFGVVLWEIFSFGLQPYYGFSNQEVIEMVRKRQLLPCSEDCPPRMYSLMTECWNEIPSRRPRFKDIHVRLRSWEGLSSHTSSTTPSGGNATTQTTSLSASPVSNLSNPRYPNYMFPSQGITPQGQIAGFIGPPIPQNQRFIPINGYPIPPGYAAFPAAHYQPTGPPRVIQHCPPPKSRSPSSASGSTSTGHVTSLPSSGSNQEANIPLLPHMSIPNHPGGMGITVFGNKSQKPYKIDSKQASLLGDANIHGHTESMISAEL

SEQ ID NO: 169 - protein, 314 aa, Homo sapiens
MGIGRSEGGRRGAALGVLLALGAALLAVGSASEYDYVSFQSDIGPYQSGRFYTKPPQCVDIPADLRLCHNVGYKKMVLPNLLEHETMAEVKQQASSWVPLLNKNCHAGTQVFLCSLFAPVCLDRPIYPCRWLCEAVRDSCEPVMQFFGFYWPEMLKCDKFPEGDVCIAMTPPNATEASKPQGTTVCPPCDNELKSEAIIEHLCASEFALRMKIKEVKKENGDKKIVPKKKKPLKLGPIKKKDLKKLVLYLKNGADCPCHQLDNLSHHFLIMGRKVKSQYLLTAIHKWDKKNKEFKNFMKKMKNHECPTFQSVFK

SEQ ID NO: 170 - protein, 323 aa, Homo sapiens
MQAAWLLGALVVPQLLGFGHGARGAEREWEGGWGGAQEEEREREALMLKHLQEALGLPAGRGDENPAGTVEGKEDWEMEEDQGEEEEEEATPTPSSGPSPSPTPEDIVTYILGRLAGLDAGLHQLHVRLHALDTRVVELTQGLRQLRNAAGDTRDAVQALQEAQGRAEREHGRLEGCLKGLRLGHKCFLLSRDFEAQAAAQARCTARGGSLAQPADRQQMEALTRYLRAALAPYNWPVWLGVHDRRAEGLYLFENGQRVSFFAWHRSPRPELGAQPSASPHPLSPDQPNGGTLENCVAQASDDGSWWDHDCQRRLYYVCEFPF

SEQ ID NO: 171 - protein, 93 aa, Homo sapiens
MNAKVVVVLVLVLTALCLSDGKPVSLSYRCPCRFFESHVARANVKHLKILNTPNCALQIVARLKNNNRQVCIDPKLKWIQEYLEKALNKRFKM

SEQ ID NO: 172 - protein, 771 aa, Homo sapiens [sequence omitted]

SEQ ID NO: 173 - protein, 325 aa, Homo sapiens
MVCGSPGGMLLLRAGLLALAALCLLRVPGARAAACEPVRIPLCKSLPWNMTKMPNHLHHSTQANAILAIEQFEGLLGTHCSPDLLFFLCAMYAPICTIDFQHEPIKPCKSVCERARQGCEPILIKYRHSWPENLACEELPVYDRGVCISPEAIVTADGADFPMDSSNGNCRGASSERCKCKPIRATQKTYFRNNYNYVIRAKVKEIKTKCHDVTAVVEVKEILKSSLVNIPRDTVNLYTSSGCLCPPLNVNEEYIIMGYEDEERSRLLLVEGSIAEKWKDRLGKKVKRWDMKLRHLGLSKSDSSNSDSTQSQKSGRNSNPRQARN

SEQ ID NO: 174 - protein, 958 aa, Homo sapiens
MHTCCPPVTLEQDLHRKMHSWMLQTLAFAVTSLVLSCAETIDYYGEICDNACPCEEKDGILTVSCENRGIISLSEISPPRFPIYHLLLSGNLLNRLYPNEFVNYTGASILHLGSNVIQDIETGAFHGLRGLRRLHLNNNKLELLRDDTFLGLENLEYLQVDYNYISVIEPNAFGKLHLLQVLILNDNLLSSLPNNLFRFVPLTHLDLRGNRLKLLPYVGLLQHMDKVVELQLEENPWNCSCELISLKDWLDSISYSALVGDVVCETPFRLHGRDLDEVSKQELCPRRLISDYEMRPQTPLSTTGYLHTTPASVNSVATSSSAVYKPPLKPPKGTRQPNKPRVRPTSRQPSKDLGYSNYGPSIAYQTKSPVPLECPTACSCNLQISDLGLNVNCQERKIESIAELQPKPYNPKKMYLTENYIAVVRRTDFLEATGLDLLHLGNNRISMIQDRAFGDLTNLRRLYLNGNRIERLSPELFYGLQSLQYLFLQYNLIREIQSGTFDPVPNLQLLFLNNNLLQAMPSGVFSGLTLLRLNLRSNHFTSLPVSGVLDQLKSLIQIDLHDNPWDCTCDIVGMKLWVEQLKVGVLVDEVICKAPKKFAETDMRSIKSELLCPDYSDVVVSTPTPSSIQVPARTSAVTPAVRLNSTGAPASLGAGGGASSVPLSVLILSLLLVFIMSVFVAAGLFVLVMKRRKKNQSDHTSTNNSDVSSFNMQYSVYGGGGGTGGHPHAHVHHRGPALPKVKTPAGHVYEYIPHPLGHMCKNPIYRSREGNSVEDYKDLHELKVTYSSNHHLQQQQQPPPPPQQPQQQPPPQLQLQPGEEERRESHHLRSPAYSVSTIEPREDLLSPVQDADRFYRGILEPDKHCSTTPAGNSLPEYPKFPCSPAAYTFSPNYDLRRPHQYLHPGAGDSRLREPVLYSPPSAVFVEPNRNEYLELKAKLNVEPDYLEVLEKQTTFSQF

SEQ ID NO: 175 - protein, 384 aa, Homo sapiens
MDPAGGPRGVLPRPCRVLVLLNPRGGKGKALQLFRSHVQPLLAEAEISFTLMLTERRNHARELVRSEELGRWDALVVMSGDGLMHEVVNGLMERPDWETAIQKPLCSLPAGSGNALAASLNHYAGYEQVTNEDLLTNCTLLLCRRLLSPMNLLSLHTASGLRLFSVLSLAWGFIADVDLESEKYRRLGEMRFTLGTFLRLAALRTYRGRLAYLPVGRVGSKTPASPVVVQQGPVDAHLVPLEEPVPSHWTVVPDEDFVLVLALLHSHLGSEMFAAPMGRCAAGVMHLFYVRAGVSRAMLLRLFLAMEKGRHMEYECPYLVYVPVVAFRLEPKDGKGVFAVDGELMVSEAVQGQVHPNYFWMVSGCVEPPPSWKPQQMPPPEEPL

SEQ ID NO: 176 - protein, 807 aa, Homo sapiens
MRLSPAPLKLSRTPALLALALPLAAALAFSDETLDKVPKSEGYCSRILRAQGTRREGYTEFSLRVEGDPDFYKPGTSYRVTLSAAPPSYFRGFTLIALRENREGDKEEDHAGTFQIIDEEETQFMSNCPVAVTESTPRRRTRIQVFWIAPPAGTGCVILKASIVQKRIIYFQDEGSLTKKLCEQDSTFDGVTDKPILDCCACGTAKYRLTFYGNWSEKTHPKDYPRRANHWSAIIGGSHSKNYVLWEYGGYASEGVKQVAELGSPVKMEEEIRQQSDEVLTVIKAKAQWPAWQPLNVRAAPSAEFSVDRTRHLMSFLTMMGPSPDWNVGLSAEDLCTKECGWVQKVVQDLIPWDAGTDSGVTYESPNKPTIPQEKIRPLTSLDHPQSPFYDPEGGSITQVARVVIERIARKGEQCNIVPDNVDDIVADLAPEEKDEDDTPETCIYSNWSPWSACSSSTCDKGKRMRQRMLKAQLDLSVPCPDTQDFQPCMGPGCSDEDGSTCTMSEWITWSPCSISCGMGMRSRERYVKQFPEDGSVCTLPTEETEKCTVNEECSPSSCLMTEWGEWDECSATCGMGMKKRHRMIKMNPADGSMCKAETSQAEKCMMPECHTIPCLLSPWSEWSDCSVTCGKGMRTRQRMLKSLAELGDCNEDLEQVEKCMLPECPIDCELTEWSQWSECNKSCGKGHVIRTRMIQMEPQFGGAPCPETVQRKKCRIRKCLRNPSIQKLRWREARESRRSEQLKEESEGEQFPGCRMRPWTAWSECTKLCGGGIQERYMTVKKRFKSSQFTSCKDKKEIRACNVHPC

SEQ ID NO: 177 - protein, 709 aa, Homo sapiens
MAETLEFNDVYQEVKGSMNDGRLRLSRQGIIFKNSKTGKVDNIQAGELTEGIWRRVALGHGLKLLTKNGHVYKYDGFRESEFEKLSDFFKTHYRLELMEKDLCVKGWNWGTVKFGGQLLSFDIGDQPVFEIPLSNVSQCTTGKNEVTLEFHQNDDAEVSLMEVRFYVPPTQEDGVDPVEAFAQNVLSKADVIQATGDAICIFRELQCLTPRGRYDIRIYPTFLHLHGKTFDYKIPYTTVLRLFLLPHKDQRQMFFVISLDPPIKQGQTRYHFLILLFSKDEDISLTLNMNEEEVEKRFEGRLTKNMSGSLYEMVSRVMKALVNRKITVPGNFQGHSGAQCITCSYKASSGLLYPLERGFIYVHKPPVHIRFDEISFVNFARGTTTTRSFDFEIETKQGTQYTFSSIEREEYGKLFDFVNAKKLNIKNRGLKEGMNPSYDEYADSDEDQHDAYLERMKEEGKIREENANDSSDDSGEETDESFNPGEEEEDVAEEFDSNASASSSSNEGDSDRDEKKRKQLKKAKMAKDRKSRKKPVEVKKGKDPNAPKRPMSAYMLWLNASREKIKSDHPGISITDLSKKAGEIWKGMSKEKKEEWDRKAEDARRDYEKAMKEYEGGRGESSKRDKSKKKKKVKVKMEKKSTPSRGSSSKSSSRQLSESFKSKEFVSSDESSSGENKSKKKRRRSEDSEEEELASTPPSSEDSASGSDE

SEQ ID NO: 178 - protein, 561 aa, Homo sapiens
MRHCINCCIQLLPDGAHKQQVNCQGGPHHGHQACPTCKGENKILFRVDSKQMNLLAVLEVRTEGNENWGGFLRFKKGKRCSLVFGLIIMTLVMASYILSGAHQELLISSPFHYGGFPSNPSLMDSENPSDTKEHHHQSSVNNISYMKDYPSIKLIINSITTRIEFTTRQLPDLEDLKKQELHMFSVIPNKFLPNSKSPCWYEEFSGQNTTDPYLTNSYVLYSKRFRSTFDALRKAFWGHLAHAHGKHFRLRCLPHFYIIGQPKCGTTDLYDRLRLHPEVKFSAIKEPHWWTRKRFGIVRLRDGLRDRYPVEDYLDLFDLAAHQIHQGLQASSAKEQSKMNTIIIGEASASTMWDNNAWTFFYDNSTDGEPPFLTQDFIHAFQPNARLIVMLRDPVERLYSDYLYFASSNKSADDFHEKVTEALQLFENCMLDYSLRACVYNNTLNNAMPVRLQVGLYAVYLLDWLSVFDKQQFLILRLEDHASNVKYTMHKVFQFLNLGPLSEKQEALMTKSPASNARRPEDRNLGPMWPITQKILRDFYRPFNARLAQVLADEAFAWKTT

SEQ ID NO: 179 - protein, 335 aa, Homo sapiens
MGHPPLLPLLLLLHTCVPASWGLRCMQCKTNGDCRVEECALGQDLCRTTIVRLWEEGEELELVEKSCTHSEKTNRTLSYRTGLKITSLTEVVCGLDLCNQGNSGRAVTYSRSRYLECISCGSSDMSCERGRHQSLQCRSPEEQCLDVVTHWIQEGEEGRPKDDRHLRGCGYLPGCPGSNGFHNNDTFHFLKCCNTTKCNEGPILELENLPQNGRQCYSCKGNSTHGCSSEETFLIDCRGPMNQCLVATGTHEPKNQSYMVRGCATASMCQHAHLGDAFSMNHIDVSCCTKSGCNHPDLDVQYRSGAAPQPGPAHLSLTITLLMTARLWGGTLLWT

SEQ ID NO: 180 - protein, 423 aa, Homo sapiens
MALKVLLEQEKTFFTLLVLLGYLSCKVTCESGDCRQQEFRDRSGNCVPCNQCGPGMELSKECGFGYGEDAQCVTCRLHRFKEDWGFQKCKPCLDCAVVNRFQKANCSATSDAICGDCLPGFYRKTKLVGFQDMECVPCGDPPPPYEPHCASKVNLVKIASTASSPRDTALAAVICSALATVLLALLILCVIYCKRQFMEKKPSWSLRSQDIQYNGSELSCFDRPQLHEYAHRACCQCRRDSVQTCGPVRLLPSMCCEEACSPNPATLGCGVHSAASLQARNAGPAGEMVPTFFGSLTQSICGEFSDAWPLMQNPMGGDNISFCDSYPELTGEDIHSLNPELESSTSLDSNSSQDLVGGAVPVQSHSENFTAATDLSRYNNTLVESASTQDALTMRSQLDQESGAVIHPATQTSLQVRQRLGSL

SEQ ID NO: 181 - protein, 304 aa, Homo sapiens
MIYTMKKVHALWASVCLLLNLAPAPLNADSEEDEEHTIITDTELPPLKLMHSFCAFKADDGPCKAIMKRFFFNIFTRQCEEFIYGGCEGNQNRFESLEECKKMCTRDNANRIIKTTLQQEKPDFCFLEEDPGICRGYITRYFYNNQTKQCERFKYGGCLGNMNNFETLEECKNICEDGPNGFQVDNYGTQLNAVNNSLTPQSTKVPSLFEFHGPSWCLTPADRGLCRANENRFYYNSVIGKCRPFKYSGCGGNENNFTSKQECLRACKKGFIQRISKGGLIKTKRKRKKQRVKIAYEEIFVKNM

SEQ ID NO: 182 - protein, 851 aa, Homo sapiens
MTSHYVIAIFALMSSCLATAGPEPGALCELSPVSASHPVQALMESFTVLSGCASRGTTGLPQEVHVLNLRTAGQGPGQLQREVTLHLNPISSVHIHHKSVVFLLNSPHPLVWHLKTERLATGVSRLFLVSEGSVVQFSSANFSLTAETEERNFPHGNEHLLNWARKEYGAVTSFTELKIARNIYIKVGEDQVFPPKCNIGKNFLSLNYLAEYLQPKAAEGCVMSSQPQNEEVHIIELITPNSNPYSAFQVDITIDIRPSQEDLEVVKNLILILKCKKSVNWVIKSFDVKGSLKIIAPNSIGFGKESERSMTMTKSIRDDIPSTQGNLVKWALDNGYSPITSYTMAPVANRFHLRLENNAEEMGDEEVHTIPPELRILLDPGALPALQNPPIRGGEGQNGGLPFPFPDISRRVWNEEGEDGLPRPKDPVIPSIQLFPGLREPEEVQGSVDIALSVKCDNEKMIVAVEKDSFQASGYSGMDVTLLDPTCKAKMNGTHFVLESPLNGCGTRPRWSALDGVVYYNSIVIQVPALGDSSGWPDGYEDLESGDNGFPGDMDEGDASLFTRPEIVVFNCSLQQVRNPSSFQEQPHGNITFNMELYNTDLFLVPSQGVFSVPENGHVYVEVSVTKAEQELGFAIQTCFISPYSNPDRMSHYTIIENICPKDESVKFYSPKRVHFPIPQADMDKKRFSFVFKPVFNTSLLFLQCELTLCTKMEKHPQKLPKCVPPDEACTSLDASIIWAMMQNKKTFTKPLAVIHHEAESKEKGPSMKEPNPISPPIFHGLDTLTVMGIAFAAFVIGALLTGALWYIYSHTGETAGRQQVPTSPPASENSSAAHSIGSTQSTPCSSSSTA

SEQ ID NO: 183 - protein, 1170 aa, Homo sapiens
MGLAWGLGVLFLMHVCGTNRIPESGGDNSVFDIFELTGAARKGSGRRLVKGPDPSSPAFRIEDANLIPPVPDDKFQDLVDAVRAEKGFLLLASLRQMKKTRGTLLALERKDHSGQVFSVVSNGKAGTLDLSLTVQGKQHVVSVEEALLATGQWKSITLFVQEDRAQLYIDCEKMENAELDVPIQSVFTRDLASIARLRIAKGGVNDNFQGVLQNVRFVFGTTPEDILRNKGCSSSTSVLLTLDNNVVNGSSPAIRTNYIGHKTKDLQAICGISCDELSSMVLELRGLRTIVTTLQDSIRKVTEENKELANELRRPPLCYHNGVQYRNNEEWTVDSCTECHCQNSVTICKKVSCPIMPCSNATVPDGECCPRCWPSDSADDGWSPWSEWTSCSTSCGNGIQQRGRSCDSLNNRCEGSSVQTRTCHIQECDKRFKQDGGWSHWSPWSSCSVTCGDGVITRIRLCNSPSPQMNGKPCEGEARETKACKKDACPINGGWGPWSPWDICSVTCGGGVQKRSRLCNNPTPQFGGKDCVGDVTENQICNKQDCPIDGCLSNPCFAGVKCTSYPDGSWKCGACPPGYSGNGIQCTDVDECKEVPDACFNHNGEHRCENTDPGYNCLPCPPRFTGSQPFGQGVEHATANKQVCKPRNPCTDGTHDCNKNAKCNYLGHYSDPMYRCECKPGYAGNGIICGEDTDLDGWPNENLVCVANATYHCKKDNCPNLPNSGQEDYDKDGIGDACDDDDDNDKIPDDRDNCPFHYNPAQYDYDRDDVGDRCDNCPYNHNPDQADTDNNGEGDACAADIDGDGILNERDNCQYVYNVDQRDTDMDGVGDQCDNCPLEHNPDQLDSDSDRIGDTCDNNQDIDEDGHQNNLDNCPYVPNANQADHDKDGKGDACDHDDDNDGIPDDKDNCRLVPNPDQKDSDGDGRGDACKDDFDHDSVPDIDDICPENVDISETDFRRFQMIPLDPKGTSQNDPNWVVRHQGKELVQTVNCDPGLAVGYDEFNAVDFSGTFFINTERDDDYAGFVFGYQSSSRFYVVMWKQVTQSYWDTNPTRAQGYSGLSVKVVNSTTGPGEHLRNALWHTGNTPGQVRTLWHDPRHIGWKDFTAYRWRLSHRPKTGFIRVVMYEGKKIMADSGPIYDKTYAGGRLGLFVFSQEMVFFSDLKYECRDP

SEQ ID NO: 184 - protein, 163 aa, Homo sapiens
MRRLLIPLALWLGAVGVGVAELTEAQRRGLQVALEEFHKHPPVQWAFQETSVESAVDTPFPAGIFVRLEFKLQQTSCRKRDWKKPECKVRPNGRKRKCLACIKLGSEDKVLGRLVHCPIETQVLREAEEHQETQCLRVQRAGEDPHSFYFPGQFAFSKALPRS

SEQ ID NO: 185 - protein, 211 aa, Homo sapiens
MTPWLGLIVLLGSWSLGDWGAEACTCSPSHPQDAFCNSDIVIRAKVVGKKLVKEGPFGTLVYTIKQMKMYRGFTKMPHVQYIHTEASESLCGLKLEVNKYQYLLTGRVYDGKMYTGLCNFVERWDQLTLSQRKGLNYRYHLGCNCKIKSCYYLPCFVTSKNECLWTDMLSNFGYPGYQSKHYACIRQKGGYCSWYRGWAPPDKSIINATDP

SEQ ID NO: 186 - protein, 455 aa, Homo sapiens
MGLSTVPDLLLPLVLLELLVGIYPSGVIGLVPHLGDREKRDSVCPQGKYIHPQNNSICCTKCHKGTYLYNDCPGPGQDTDCRECESGSFTASENHLRHCLSCSKCRKEMGQVEISSCTVDRDTVCGCRKNQYRHYWSENLFQCFNCSLCLNGTVHLSCQEKQNTVCTCHAGFFLRENECVSCSNCKKSLECTKLCLPQIENVKGTEDSGTTVLLPLVIFFGLCLLSLLFIGLMYRYQRWKSKLYSIVCGKSTPEKEGELEGTTTKPLAPNPSFSPTPGFTPTLGFSPVPSSTFTSSSTYTPGDCPNFAAPRREVAPPYQGADPILATALASDPIPNPLQKWEDSAHKPQSLDTDDPATLYAVVENVPPLRWKEFVRRLGLSDHEIDRLELQNGRCLREAQYSMLATWRRRTPRREATLELLGRVLRDMDLLGCLEDIEEALCGPAALPPAPSLLR

SEQ ID NO: 187 - protein, 461 aa, Homo sapiens
MAPVAVWAALAVGLELWAAAHALPAQVAFTPYAPEPGSTCRLREYYDQTAQMCCSKCSPGQHAKVFCTKTSDTVCDSCEDSTYTQLWNWVPECLSCGSRCSSDQVETQACTREQNRICTCRPGWYCALSKQEGCRLCAPLRKCRPGFGVARPGTETSDVVCKPCAPGTFSNTTSSTDICRPHQICNVVAIPGNASMDAVCTSTSPTRSMAPGAVHLPQPVSTRSQHTQPTPEPSTAPSTSFLLPMGPSPPAEGSTGDFALPVGLIVGVTALGLLIIGVVNCVIMTQVKKKPLCLQREAKVPHLPADKARGTQGPEQQHLLITAPSSSSSSLESSASALDRRAPTRNQPQAPGVEASGAGEARASTGSSDSSPGGHGTQVNVTCIVNVCSSSDHSSQCSSQASSTMGDTDSSPSESPKDEQVPFSKEECAFRSQLETPETLLGSTEEKPLPLGVPDAGMKPS

SEQ ID NO: 188 - protein, 251 aa, Homo sapiens
MAEDLGLSFGETASVEMLPEHGSCRPKARSSSARWALTCCLVLLPFLAGLTTYLLVSQLRAQGEACVQFQALKGQEFAPSHQQVYAPLRADGDKPRAHLTVVRQTPTQHFKNQFPALHWEHELGLAFTKNRMNYTNKFLLIPESGDYFIYSQVTFRGMTSECSEIRQAGRPNKPDSITVVITKVTDSYPEPTQLLMGTKSVCEVGSNWFQPIYLGAMFSLQEGDKLMVNVSDISLVDYTKEDKTFFGAFLL

SEQ ID NO: 189 - protein, 325 aa, Homo sapiens
MDMWTALLILQALLLPSLADGATPALRFVAVGDWGGVPNAPFHTAREMANAKEIARTVQILGADFILSLGDNFYFTGVQDINDKRFQETFEDVFSDRSLRKVPWYVLAGNHDHLGNVSAQIAYSKISKRWNFPSPFYRLHFKIPQTNVSVAIFMLDTVTLCGNSDDFLSQQPERPRDVKLARTQLSWLKKQLAAAREDYVLVAGHYPVWSIAEHGPTHCLVKQLRPLLATYGVTAYLCGHDHNLQYLQDENGVGYVLSGAGNFMDPSKRHQRKVPNGYLRFHYGTEDSLGGFAYVEISSKEMTVTYIEASGKSLFKTRLPRRARP

SEQ ID NO: 190 - protein, 304 aa, Homo sapiens
MCGPDDRCPARWPGPGRAVKCGKGLAAARPGRVERGGAQRGGAGLELHPLLGGRTWRAARDADGCEALGTVAVPFDDDDKIVGGYTCEENSLPYQVSLNSGSHFCGGSLISEQWVVSAAHCYKTRIQVRLGEHNIKVLEGNEQFINAAKIIRHPKYNRDTLDNDIMLIKLSSPAVINARVSTISLPTTPPAAGTECLISGWGNTLSFGADYPDELKCLDAPVLTQAECKASYPGKITNSMFCVGFLEGGKDSCQRDSGGPVVCNGQLQGVVSWGHGCAWKNRPGVYTKVYNYVDWIKDTIAANS

SEQ ID NO: 191 - protein, 277 aa, Homo sapiens
MIILIYLFLLLWEDTQGWGFKDGIFHNSIWLERAAGVYHREARSGKYKLTYAEAKAVCEFEGGHLATYKQLEAARKIGFHVCAAGWMAKGRVGYPIVKPGPNCGFGKTGIIDYGIRLNRSERWDAYCYNPHAKECGGVFTDPKQIFKSPGFPNEYEDNQICYWHIRLKYGQRIHLSFLDFDLEDDPGCLADYVEIYDSYDDVHGFVGRYCGDELPDDIISTGNVMTLKFLSDASVTAGGFQIKYVAMDPVSKSSQGKNTSTTSTGNKNFLAGRFSHL

SEQ ID NO: 192 - protein, 159 aa, Homo sapiens
MFPFALLYVLSVSFRKIFILQLVGLVLTYDFTNCDFEKIKAAYLSTISKDLITYMSGTKSTEFNNTVSCSNRPHCLTEIQSLTFNPTAGCASLAKEMFAMKTKAALAIWCPGYSETQINATQAMKKRRKRKVTTNKCLEQVSQLQGLWRRFNRPLLKQQ

SEQ ID NO: 193 - protein, 1172 aa, Homo sapiens
MVWRLVLLALWVWPSTQAGHQDKDTTFDLFSISNINRKTIGAKQFRGPDPGVPAYRFVRFDYIPPVNADDLSKITKIMRQKEGFFLTAQLKQDGKSRGTLLALEGPGLSQRQFEIVSNGPADTLDLTYWIDGTRHVVSLEDVGLADSQWKNVTVQVAGETYSLHVGCDLIDSFALDEPFYEHLQAEKSRMYVAKGSARESHFRGLLQNVHLVFENSVEDILSKKGCQQGQGAEINAISENTETLRLGPHVTTEYVGPSSERRPEVCERSCEELGNMVQELSGLHVLVNQLSENLKRVSNDNQFLWELIGGPPKTRNMSACWQDGRFFAENETWVVDSCTTCTCKKFKTICHQITCPPATCASPSFVEGECCPSCLHSVDGEEGWSPWAEWTQCSVTCGSGTQQRGRSCDVTSNTCLGPSIQTRACSLSKCDTRIRQDGGWSHWSPWSSCSVTCGVGNITRIRLCNSPVPQMGGKNCKGSGRETKACQGAPCPIDGRWSPWSPWSACTVTCAGGIRERTRVCNSPEPQYGGKACVGDVQERQMCNKRSCPVDGCLSNPCFPGAQCSSFPDGSWSCGSCPVGFLGNGTHCEDLDECALVPDICFSTSKVPRCVNTQPGFHCLPCPPRYRGNQPVGVGLEAAKTEKQVCEPENPCKDKTHNCHKHAECIYLGHFSDPMYKCECQTGYAGDGLICGEDSDLDGWPNLNLVCATNATYHCIKDNCPHLPNSGQEDFDKDGIGDACDDDDDNDGVTDEKDNCQLLFNPRQADYDKDEVGDRCDNCPYVHNPAQIDTDNNGEGDACSVDIDGDDVFNERDNCPYVYNTDQRDTDGDGVGDHCDNCPLVHNPDQTDVDNDLVGDQCDNNEDIDDDGHQNNQDNCPYISNANQADHDRDGQGDACDPDDDNDGVPDDRDNCRLVFNPDQEDLDGDGRGDICKDDFDNDNIPDIDDVCPENNAISETDFRNFQMVPLDPKGTTQIDPNWVIRHQGKELVQTANSDPGIAVGFDEFGSVDFSGTFYVNTDRDDDYAGFVFGYQSSSRFYVVMWKQVTQTYWEDQPTRAYGYSGVSLKVVNSTTGTGEHLRNALWHTGNTPGQVRTLWHDPRNIGWKDYTAYRWHLTHRPKTGYIRVLVHEGKQVMADSGPIYDQTYAGGRLGLFVFSQEMVYFSDLKYECRDI

SEQ ID NO: 194 - protein, 249 aa, Homo sapiens
MAARRSQRRRGRRGEPGTALLVPLALGLGLALACLGLLLAVVSLGSRASLSAQEPAQEELVAEEDQDPSELNPQTEESQDPAPFLNRLVRPRRSAPKGRKTRARRAIAAHYEVHPRPGQDGAQAGVDGTVSGWEEARINSSSPLRYNRQIGEFIVTRAGLYYLYCQVHFDEGKAVYLKLDLLVDGVLALRCLEEFSATAASSLGPQLRLCQVSGLLALRPGSSLRIRTLPWAHLKAAPFLTYFGLFQVH

SEQ ID NO: 195 - protein, 172 aa, Homo sapiens
METRPRLGATCLLGFSFLLLVISSDGHNGLGKGFGDHIHWRTLEDGKKEAAASGLPLMVIIHKSWCGACKALKPKFAESTEISELSHNFVMVNLEDEEEPKDEDFSPDGGYIPRILFLDPSGKVHPEIINENGNPSYKYFYVSAEQVVQGMKEAQERLTGDAFRKKHLEDEL

SEQ ID NO: 196 - protein, 931 aa, Homo sapiens
MRKGLRATAARCGLGLGYLLQMLVLPALALLSASGTGSAAQDDDFFHELPETFPSDPPEPLPHFLIEPEEAYIVKNKPVNLYCKASPATQIYFKCNSEWVHQKDHIVDERVDETSGLIVREVSIEISRQQVEELFGPEDYWCQCVAWSSAGTTKSRKAYVRIAYLRKTFEQEPLGKEVSLEQEVLLQCRPPEGIPVAEVEWLKNEDIIDPVEDRNFYITIDHNLIIKQARLSDTANYTCVAKNIVAKRKSTTATVIVYVNGGWSTWTEWSVCNSRCGRGYQKRTRTCTNPAPLNGGAFCEGQSVQKIACTTLCPVDGRWTPWSKWSTCGTECTHWRRRECTAPAPKNGGKDCDGLVLQSKNCTDGLCMQTAPDSDDVALYVGIVIAVIVCLAISVVVALFVYRKNHRDFESDIIDSSALNGGFQPVNIKAARQDLLAVPPDLTSAAAMYRGPVYALHDVSDKIPMTNSPILDPLPNLKIKVYNTSGAVTPQDDLSEFTSKLSPQMTQSLLENEALSLKNQSLARQTDPSCTAFGSFNSLGGHLIVPNSGVSLLIPAGAIPQGRVYEMYVTVHRKETMRPPMDDSQTLLTPVVSCGPPGALLTRPVVLTMHHCADPNTEDWKILLKNQAAQGQWEDVVVVGEENFTTPCYIQLDAEACHILTENLSTYALVGHSTTKAAAKRLKLAIFGPLCCSSLEYSIRVYCLDDTQDALKEILHLERQMGGQLLEEPKALHFKGSTHNLRLSIHDIAHSLWKSKLLAKYQEIPFYHVWSGSQRNLHCTFTLERFSLNTVELVCKLCVRQVEGEGQIFQLNCTVSEEPTGIDLPLLDPANTITTVTGPSAFSIPLPIRQKLCSSLDAPQTRGHDWRMLAHKLNLDRYLNYFATKSSPTGVILDLWEAQNFPDGNLSMLAAVLEEMGRHETVVSLAAEGQY

SEQ ID NO: 197 - protein, 431 aa, Homo sapiens
MRALLARLLLCVLVVSDSKGSNELHQVPSNCDCLNGGTCVSNKYFSNIHWCNCPKKFGGQHCEIDKSKTCYEGNGHFYRGKASTDTMGRPCLPWNSATVLQQTYHAHRSDALQLGLGKHNYCRNPDNRRRPWCYVQVGLKPLVQECMVHDCADGKKPSSPPEELKFQCGQKTLRPRFKIIGGEFTTIENQPWFAAIYRRHRGGSVTYVCGGSLISPCWVISATHCFIDYPKKEDYIVYLGRSRLNSNTQGEMKFEVENLILHKDYSADTLAHHNDIALLKIRSKEGRCAQPSRTIQTICLPSMYNDPQFGTSCEITGFGKENSTDYLYPEQLKMTVVKLISHRECQQPHYYGSEVTTKMLCAADPQWKTDSCQGDSGGPLVCSLQGRMTLTGIVSWGRGCALKDKPGVYTRVSHFLPWIRSHTKEENGLAL

SEQ ID NO: 198 - protein, 950 aa, Homo sapiens
MTWRMGPRFTMLLAMWLVCGSEPHPHATIRGSHGGRKVPLVSPDSSRPARFLRHTGRSRGIERSTLEEPNLQPLQRRRSVPVLRLARPTEPPARSDINGAAVRPEQRPAARGSPREMIRDEGSSARSRMLRFPSGSSSPNILASFAGKNRVWVISAPHASEGYYRLMMSLLKDDVYCELAERHIQQIVLFHQAGEEGGKVRRITSEGQILEQPLDPSLIPKLMSFLKLEKGKFGMVLLKKTLQVEERYPYPVRLEAMYEVIDQGPIRRIEKIRQKGFVQKCKASGVEGQVVAEGNDGGGGAGRPSLGSEKKKEDPRRAQVPPTRESRVKVLRKLAATAPALPQPPSTPRATTLPPAPATTVTRSTSRAVTVAARPMTTTAFPTTQRPWTPSPSHRPPTTTEVITARRPSVSENLYPPSRKDQHRERPQTTRRPSKATSLESFTNAPPTTISEPSTRAAGPGRFRDNRMDRREHGHRDPNVVPGPPKPAKEKPPKKKAQDKILSNEYEEKYDLSRPTASQLEDELQVGNVPLKKAKESKKHEKLEKPEKEKKKKMKNENADKLLKSEKQMKKSEKKSKQEKEKSKKKKGGKTEQDGYQKPTNKHFTQSPKKSVADLLGSFEGKRRLLLITAPKAENNMYVQQRDEYLESFCKMATRKISVITIFGPVNNSTMKIDHFQLDNEKPMRVVDDEDLVDQRLISELRKEYGMTYNDFFMVLTDVDLRVKQYYEVPITMKSVFDLIDTFQSRIKDMEKQKKEGIVCKEDKKQSLENFLSRFRWRRRLLVISAPNDEDWAYSQQLSALSGQACNFGLRHITILKLLGVGEEVGGVLELFPINGSSVVEREDVPAHLVKDIRNYFQVSPEYFSMLLVGKDGNVKSWYPSPMWSMVIVYDLIDSMQLRRQEMAIQQSLGMRCPEDEYAGYGYHSYHQGYQDGYQDDYRHHESYHHGYPY

SEQ ID NO: 199 - protein, 232 aa, Homo sapiens
MNFLLSWVHWSLALLLYLHHAKWSQAAPMAEGGGQNHHEVVKFMDVYQRSYCHPIETLVDIFQEYPDEIEYIFKPSCVPLMRCGGCCNDEGLECVPTEESNITMQIMRIKPHQGQHIGEMSFLQHNKCECRPKKDRARQEKKSVRGKGKGQKRKRKKSRYKSWSVYVGARCCLMPWSLPGPHPCGPCSERRKHLFVQDPQTCKCSCKNTDSRCKARQLELNERTCRCDKPRR

SEQ ID NO: 200 - protein, 232 aa, Homo sapiens; identical to SEQ ID NO: 199

SEQ ID NO: 201 - protein, 419 aa, Homo sapiens
MHLLGFFSVACSLLAAALLPGPREAPAAAAAFESGLDLSDAEPDAGEATAYASKDLEEQLRSVSSVDELMTVLYPEYWKMYKCQLRKGGWQHNREQANLNSRTEETIKFAAAHYNTEILKSIDNEWRKTQCMPREVCIDVGKEFGVATNTFFKPPCVSVYRCGGCCNSEGLQCMNTSTSYLSKTLFEITVPLSQGPKPVTISFANHTSCRCMSKLDVYRQVHSIIRRSLPATLPQCQAANKTCPTNYMWNNHICRCLAQEDFMFSSDAGDDSTDGFHDICGPNKELDEETCQCVCRAGLRPASCGPHKELDRNSCQCVCKNKLFPSQCGANREFDENTCQCVCKRTCPRNQPLNPGKCACECTESPQKCLLKGKKFHHQTCSCYRRPCTNRQKACEPGFSYSEEVCRCVPSYWKRPQMS

SEQ ID NO: 202 - protein, 838 aa, Homo sapiens
MTGAEIEPSAQAKPEKKAGEEVIAGPERENDVPLVVRPKVRTQATTGARPKTETKSVPAARPKTEAQAMSGARPKTEVQVMGGARPKTEAQGITGARPKTDARAVGGARSKTDAKAIPGARPKDEAQAWAQSEFGTEAVSQAEGVSQTNAVAWPLATAESGSVTKSKGLSMDRELVNVDAETFPGTQGQKGIQPWFGPGEETNMGSWCYSRPRAREEASNESGFWSADETSTASSFWTGEETSVRSWPREESNTRSRHRAKHQTNPRSRPRSKQEAYVDSWSGSEDEASNPFSFWVGENTNNLFRPRVREEANIRSKLRTNREDCFESESEDEFYKQSWVLPGEEANSRFRHRDKEDPNTALKLRAQKDVDSDRVKQEPRFEEEVIIGSWFWAEKEASLEGGASAICESEPGTEEGAIGGSAYWAEEKSSLGAVAREEAKPESEEEAIFGSWFWDRDEACFDLNPCPVYKVSDRFRDAAEELNASSRPQTWDEVTVEFKPGLFHGVGFRSTSPFGIPEEASEMLEAKPKNLELSPEGEEQESLLQPDQPSPEFTFQYDPSYRSVREIREHLRARESAESESWSCSCIQCELKIGSEEFEEFLLLMDKIRDPFIHEISKIAMGMRSASQFTRDFIRDSGVVSLIETLLNYPSSRVRTSFLENMIHMAPPYPNLNMIETFICQVCEETLAHSVDSLEQLTGIRMLRHLTMTIDYHTLIANYMSGFLSLLTTANARTKFHVLKMLLNLSENPAVAKKLFSAKALSIFVGLFNIEETNDNIQIVIKMFQNISNIIKSGKMSLIDDDFSLEPLISAFREFEELAKQLQAQIDNQNDPEVGQQS

SEQ ID NO: 203 - DNA, 12244 bp, Homo sapiens
gctcggtggtttaaagatggcggcggcggtggcggcggcggcggcggcggcgttgggggcgcggagccgcgacaggaggagggaaaagcagaatctgtgagtcgcctggaggcagcgcggcggctgccgtgaggaggccgggtgcggagccgccggtggcccagccactcagggccagggcctgggctgggagggagagaccggagcagcgccaggagcccgaggccggagccgaggaggaatgtgaccaggggtcggcgggggcgcgggagtacgcgagagcagggatggggcagcaggtgggccgcgtcggggaagctccggggctccagcagcctcagccccgcgggatccggggcagcagtgcagccaggccctccggccgcaggcgggacccggcggggcgcaccacagagaccggcttcaatatcttcacccagcatgatcactttgccagctgtgtggaggatggatttgagggagacaagactggaggcagtagtccagaagctttgcatcgtccctatggttgtgatgttgaaccccaggcactaaatgaggctatcaggtggagctccaaggagaacttgctcggagccactgagagtgaccctaatctcttcgttgcactttatgattttgtagcaagtggtgataacacactcagcatcactaaaggtgaaaagctacgagtccttggttacaaccagaatggtgagtggagtgaagttcgctctaagaatgggcagggctgggtgccaagcaactacatcaccccagtgaacagcctggaaaaacactcctggtaccatggacctgtgtcacgcagtgcagctgagtatctgctcagcagtctaatcaatggcagcttcctggtgcgagaaagtgagagtagccctgggcagctgtccatctcgctcaggtacgagggacgtgtgtatcactacaggatcaataccactgcagatggcaaggtgtatgtgactgctgagagccgcttcagcaccttggcagagcttgtacaccatcactccacagtggctgatgggctggtgacaacattacactacccagcacccaagtgtaataagcctacagtctatggtgtgtcccccatccacgacaaatgggaaatggagcgaacagatattaccatgaagcacaaacttgggggcggtcagtatggagaggtttacgttggcgtctggaagaaatacagccttacagttgctgtgaaaacattgaaggaagataccatggaggtagaagaattcctgaaagaagctgcagtaatgaaggaaatcaagcatcctaatctggtacaacttttaggtgtgtgtactttggagccaccattttacattgtgactgaatacatgccatacgggaatttgctggattacctccgagaatgcaaccgagaagaggtgactgcagttgtgctgctctacatggccactcagatttcttctgcaatggagtacttagagaagaagaatttcatccatagagatcttgcagctcgtaactgcctagtgggagaaaaccatgtggtaaaagtggctgactttggcttaagtagattgatgactggagacacttatactgctcatgctggagccaaatttcctattaagtggacagcaccagagagtcttgcctacaataccttctcaattaaatctgacgtctgggcttttggggtattgttgtgggaaattgctacctatggaatgtcaccatatccaggtattgacctgtctcaggtctatgacctactagaaaaaggatatcgaatggaacagcctgagggatgcccccctaaggtttatgaacttatgagagcatgctggaagtggagccctgccgataggccctcttttgctgaaacacaccaagcttttgaaaccatgttccatgactccagcatttctgaagaggtagctgaggagcttgggagagccgcctcctcgtcatctgttgttccatacctgccccggctacctatacttccttccaagactcggacactgaagaaacaggtggagaacaaggagaacattgaaggggcacaagatgccacagaaaattctgcttccagtttagcaccagggttcatcagaggtgcacaggcctctagtggatccccagcactgcctcgaaagcaaagagacaagtcacccagcagcctcttggaagatgccaaagagacatgcttcaccagggataggaaggggggcttcttcagctccttcatgaagaagagaaatgctcctacaccccccaaacgcagcagctccttccgagaaatggagaatcagccccataagaaatacgaactcacgggtaacttctcatctgttgcttctctacagcatgctgatgggttctctttcactcctgcccagcaagaggcgaatctggtgccacccaagtgctatggggggagctttgcacagaggaacctctgtaatgacgacggtggtgggggtgggggcagtggcactgctgggggtgggtggtctggcatcacaggcttctttacaccacgcttaatcaaaaagacactgggcttacgagcaggtaaacccacagccagtgatgacacttccaagccttttccaaggtcaaactctacatcttccatgtcctcagggcttccagagcaggataggatggcaatgacccttcccaggaactgccagaggtccaaactccagctggaaaggacagtgtccacctcttctcagccagaagagaatgtggacagggccaatgacatgcttccaaaaaaatcagaggaaagtgctgctccaagcagggagagaccaaaagccaagttattgcccagaggagccacagctcttcctctcagaacaccctctggggatctagccattacagagaaggaccctccaggggtgggagtggctggagtggcagctgcccccaagggtaaagagaagaatggtggggcacgacttgggatggctggagttccagaggatggagagcagccgggctggccttctccagccaaggctgcccccgtcctcccaaccactcacaaccacaaagtgccagtccttatctcacccactctgaaacacactccagctgacgtgcagctcattggcacagactctcaggggaataaattcaagctcttatctgagcatcaggtcacatcctctggagacaaggaccgaccccgacgggtaaaaccaaagtgtgccccacccccaccaccagtgatgagactactgcagcatccgtccatctgctcagaccctacagaagagccaactgccctaactgcaggacagtccacatcagaaacacaggaaggaggaaagaaggcagctctgggcgcagtgcccatcagtgggaaagctgggaggccagtgatgcctccacctcaagtgcctctgcccacatcttccatctcgccagccaaaatggccaatggcacagcaggtactaaagtggctctgagaaaaaccaaacaggccgctgagaaaatctcagcagacaaaatcagcaaagaggccctgctggaatgtgctgacctactgtccagtgcactcacggaacctgtgcccaacagccagctggtagacactggacaccagctgcttgactactgctcaggctatgtggactgcatccctcaaactcgcaacaaatttgccttccgagaggctgtgagcaaactggaactcagcctgcaggagctacaggtttcttcagcagctgctggtgtgcccgggacaaaccctgtccttaataacttattgtcatgtgtacaggaaatcagtgatgtggtgcagaggtagccactgttagcctggtgggaaaatgcacacatttctgaggggagagggaaaaggacttgttttcctgtgttcttgttttcagaaaatgaaagactcatacttgagtgtgtttatgtgaagtacctcagatccctgagttctcacgtttacagtttcatctcaaaaataagaagcaaaccacataagtataggagaggtaaattaagtgggggcaaggcagtagtggacagggttggaaactgcactggaaaatagggaacatgtgtatgtcataaggaaggcaatgcagcccatccctacctggaatgctgggaagtgctaggcagggctgctctcagcaagactgcagcagctgcacccagacctggggctctggtaggtactaatggtgattatgctccaatttacctaatgaatttggtgggacagcagaaaagaaagctgggaatgtaccaagagaaatttttgttcagggctgttggaagtagctgttagccttgcttccacaaggccattgctgctgtaataagaactgcaaatcagagtgctacaacataaaactgggaaatatggccctatctgaatgcctctgtcctattttccgctggtgtatcagttagtgcaggaagtaaagaatgctggaaagttgaatcagaaattgaaaaccttctaaaatcttacacagattagcagaagtcacttctcccagtctggtatattatttcataatggaccaggatcggcttcctgcctgttggtggctatctgtaaaccataagtacaggggtctccctagtggttcttctctgtcttttgctgggcaggctgtcttcctttattcctggtagcattcagagcattaaccagtgttgattttgaaaatagtagtccctacaggttctcacaaaggaatgaatcctgttctgatacagttcccctgcatactgacatactggccaaggacttgagcagctgtgtatttttctttatcaactaaaataccagggagatggtcttttcttgaaacccagtggcctgtatgtgactgagaggaaaagctggcttggtcctaatggctgtttctctgtacctttcccttcccttaccaccttaagcccaatccaggtagagaatagggagaggcattctcctctctatggatttgaagtgaatcacccccacattattctcacatgcttttcttctctcacatattcctccctactcccccacccaatcattgtgcttatttgtacagatcttattgggaatattctttatttattttgtcatttcacttctattttaagaatgcataattgaaggagtagtcattttcagggagcaccaggtagaccctgggaacctaatgacttaatccttaaatatgttttgcccttgaaaaataggccttttccttccttccttagttataattgtggaagctaattaggatggcatggaagtgaatctaatgagttaggtattattaatgttcttggtatcgggtctaattccagttactgcttcattctctttttaaagctttatgaatacttcccccatcctccccaaggagagctcaatacacacatatttttattttattctctcaaaggaatattagcttaggaagataggaattcaacattgagcactgagttttcttctggctctgtcattgatacactgtcaaaccacagcctcatctcttaatctatttaattaaggtaacagtacatgttctcaagggtgttgcaagtaagtgtgcagctatcccttggagagcctctctggaaagctcttttagtgcagtgttgttatgctgaattgttttccattatcttatttgctgagtagaaaatattaatgaaattaagaattgttgagattatatgaattgggctagaatactaaggggaaaactatgttttgaatagagtttggcatttttgaccaagaacaaaattgagttttcattggaaagaaaggaaaccttgattcttaccattgctgctccaaaggaggcccaggttaagaggattagaggagacacgcggtgctgggcattcctggcaggtgttgggtgatccccgcagtatgtcacctgcagttgcagcacaggcagctagtgattgggttcatctcctcctagtggttggaagagaactcagatgtaaaaaccagcggtccttctcccaccttctttcctgccattcttgctcatcatacatgtccgtaaacttgaagaactcgttttagcagctagccttttaaggtcgaggatgggaaagctaaaactgtagaatattattatgctgctttttaggtttatccctgttgttgtgggatgcaagttaagggattgtaattgtttttcagggtttttttgttttttgttttttaagcaagggctctattttcccttgagagttctggaactaagccttggagaaacactactgagtgtatttaggctccctggttttcttgcccaacaacaatctgaagggtagggggtgggggctgtgtcttactcaggggcagcacctagctgtcttgcctacagtgggtgcacgatatataaatggaattgatttttgtcaacactgtcaagagtggcattgactattggagcataccccgtccacatgatgcttgaactatgtaacttcaggggttgagggctcaaggttcaggttaaagaggcactgtcaacttactatacaagcataatttaggtttttcctttttctacttgaaaaggaccagcttaaacacaaacccttatgtaaattaaaaggtttgaatccaaagcagagagaactgcttctggaaaagtgtagtttaattttaactattctaaaagcaatgagcaaaggcccttgtccaaggcgttgacagttttctaaagtggttatgctgtatatctggatgcatgcctttgggctgccactgcttgattcctttcatgtacagataatattacttcagtttagatttcccactttaaaatgcagtgatttgtgttgaatacatcttgattgtgctttacctaaagtattttcttaaaaggctttgtgtaaaatttaaatgtatatattttcctgtagacttccatcatgattttcagagattagccttaaaaaatttggccctaagaaattcattcagtgtttttctagatgacctctgtacatagaggtcattatagtggagaccctttaccagcagcattttaagatttaaattagatagaaagtttcttaggattcaactgaaaattggctagtaaaatatgtcccaggtaataaagcatgctgactttgctaaggcactgcccatttttatttaactaaagtcatggagattttgagtttaaaggatgcagtatagatagtggtttagtgtttaggctctaatgccagtctaaaaggcaagtcatttaaccttgggagcctcagtttcctcactgtaaaacagggataataatagtaactacctcagggttgttgtaaggattaaatgagatgatatttgtaagatacttagctcaagtgcctggcacacaatgagcacactctataaatgttctactactactattattaacacctagtctagggatgcacagcagaatcccctagggttaaaaaacaaaacaaaacaaacaaaaaaaactgacggaatagccccactccagatcagaattcccagtgggctggggtctcggccagtgtattctccagtaatctcgccaggtgtttgaaacacccagtgctatctgaaaactatcagtaccccaaccctttggtttatagattaagaaactagcagaagatggttaaattacttgcctattgtctcagaacggttaattagtggcggagccaaggctagaattcaagtctcttgactttatggttgtggggtctttccaccatacctgctgccatgtgagacactgcaaaaaagtggctcagaccgacaatcagcctgtgtggtgctgcacactttctaaagcacatgctcctgacactttgaccttaaggggcttgaatgtggagtaatgggaacacaagccaagcaagcactcagtagaattcagtcatttaaaaaattcaatggggtcattcttttggacagacctcagcaacacagcaatgtgcactttgtagtaaagaaataccaacttgagtttttaaaaaacctagttagtcctacattcccttttctttaaaaaaactttattgttcacattattttaatgactatgagataatgtatatgacagcactttgagaaaatatcaactgtaatataactataaggttgtagtattgtctgtttaaaagataagacagttgattcaatgtggatggaccctgtggggtacctgaaaatgtagatacgtaagaatcacctctgtcatttatcacatttagaaatatgaaactgcttaacaggtatgagcaggtatagcaagtgtttgctaaagttgtagttcagagctgaattacttcaggaaactagggaccaactttttggtttaattccgatctttaaaaagtaagaatgtgtactcactccagaacacagaagctcttccaaggaccttgactcaagaaggatgaggtcctcttactcttctccatttatccactatatgcttggccatttatcctaaatgtggtgggaacagacttgttatctgttgatgttgacagtgtcttttttaacctatgtcctgcatagttttgttaggtttacagggggaggtggatggccataaaaccagtgcactttgggaattacttttctaggatttcctaccagttataaatgacattgacatttgtcatcttttttttctttttctaaaaagaatagctgaatttaattcacctattataaaatactcaaaagtaaattgccttggtggccacttctgaattatagctacatttcattatgaccccttctgctcccttccattttgctactgatgtcattcttgttatcaggctgtgcccctaccaggagttcatattgggttgacagggttatctatatttttgttcttgatttttgagtttcatcatcttgcattaaattgttccacctggatttggggttcatctctgtgccctaaggatctgctatgaccaatcctctttttgtaggtgggtctctggcttaagtattgataggcttcagcggtttgtgtctctgtcttagcttgtatcaagccagtagtagctcacttcctttgtaaattcctgcttcagtctgggatccgtaggagtatgtgagaacttctgaaacgtctccaactcttaacagtcaagatatctatatcatttggatagagttctggttttccaactactagacttaaagaaattctggccgggtgcggtggctcacgcctgtaatcccagcactttggggggctgaggcgggtggatcacgaggtcaggagattgagaccatcctggctaacacggtgaaaccccacctctactaaaaatacaaaaacttagctgggcgtggtggcgggcgcctgtagtcccagctactggggaggctgaggcaggagaatggcgtgaacccaggaggcggagcttgcagtgagcccagatcgcgccactgcactccagcctgggtgacagtgagactccgtctcaaaaaaaaaaaaaaaaaaaaaaaaaaaaaaaaaaagaaattctaatgcaaagcttgctttttttttcttttttccagcaagccagtagtaatagttattgttacttgctctgttcagcacaactgtagttcacttgaacttcactgtcattccctacgctcctctcttactgagaagcatgggtgggattcagggctgtgggacaagctacagcctactctggagcactcacccccatgactcagtccagcctgtctcttgggaagtttattgcaatgtgcagacggatgaatttctgcttttcatgccacctctctgaggtatgtattctatcttgagtatgtacaagatgataccttttggctgggcacagtggctcgtgcctgtaatcccagcactttgggagaccaagatgggcggatcacttgaggtcaggagtttgagaccagcctggccaacatggtgaaaccccgtctctactaaaaatataaaaattagccgggcgtagtacatgcctgtaatcccagctactcccgaggctgaggcagaattgcttgaacccaggaggcggaggttgcagtgagctgagatcgcgccgctgcactccagcctaagtgacagagtgagacacgttaagaagaaaaaaaaaaaaaaggataccttcatttctgactcaatatcctagatccaaaggacaggaaattagggaaggcttcaccctgtgggatcaagataagaagatcccatacttcttcccaggtaaggaggcctgtggcaggtcatgattcaaagctgacttggaatggcagaaactgctgagaggccacccttggagatttgtgccttcaaagatgggtttcatgagtctcagagaggaaaagacttgtcagctgggttgattttgcatgattattgaactagagctggtagacacgagcttctcagatggcagtggccagatcctccatctgtgagaatccgccacttgaagtggtttcctgagagtgttcacttggcagttgctgcgtttctcaagcccacctggcgaggtctcgccggacccttccctccaagtgcacttacttcttcatccccatgtacatctctaactttgaaattgtttacctctcctacaaaaatcttaccttttgacctgagcagagtagcaaagccctgttcactctgagggagcagctggcgtgttgaaggggaaaggccaggcacagcactgtcctcagaccacaccatatttggagcagaattgtgatacatgtcatctgtgtctattctggaaggttctttgttcatcactgtactcgcatcagcaaattttcagggtcctacctgtcactccaggctactgagctgaaccctcagaagctgaggtctccgagcatgctaagtaaccttttagaaaagctggaggcaaactgtcgaatgctagcaggctttatgaaaggaaacataaggagtttgtgtagtcagaacttgcttaaatttgcttcggaattaggcaccataaactttagttggagaatgggacttaaattttcacatatatgtatacttaattttcagcaattatgacacaataaaaagaatatgcaaatttattgttgtttcagaaggttttgcaggactgggaacgctttagtgtcatcaacagtaaacctcagatactgttctgcacagttcagaagtaccataccaggtattgtgagtggcaagaacgccaggggacagagatgcttctggtagatgagggccagagaaaccagctctcctccattttgacagcaatttctcactgtggccatttggcctccattatgttttgagaggaatttcttgagatcttgagaaatcaccatgattaggccaattgtcaatcagtattcagaaactagaaaggaacaatgagatacttgtttatggttctttagggcatatgtttgaaaaccctctcatctcagatctgtatagctggtgtgtgtttgtgtccataaatacacgtgcattgctgtcgtgcccattaagaaagggggagtaagtaaaagaggaatcgctcagatctttccttggatgaacagcagtggcgtggttggtgtgttgactgtgaacaggctgacttagctgttgatgtatactcagaacctccatctcctcccagaccctgcacttttccttctctgcagtctgattctctaatgactgtcactggacaaaccccagttttatgctcgcttagtaaaaataagtttaaacatttcatggtggttgacagaactttgtccccaaacatgcggattcaattctttaaaactcgttgaacgtttataccaaaggtcccgccccgcaggtgtgtatgtggtgcacagagggtgaggtttggagcatcgggcactgtgtgcattgctaaggggacatagtgagacaatgtgggatttaactaaaaacacatcaattgtgtgtcacattaccagtgttgtcaggtatttgttcttaattgttattgtaatatattttcagttgtttttctaatttaattctctccgtctgttgtctgactgtgaactgctaacagtgttaaacttgatgtaaataaatgaggcccttgaaagggactgctttctctgtcttctcacaaggtttgccaagttgtgttctgttttaaataaaggttgcaatattttattggcaaagtaaaaaaaaaaaaaaaaaa

SEQ ID NO: 204 - DNA, 8450 bp, Homo sapiens
gggactcggactcgctcctgggcgagctgaaagtcggctgcagcagaagctcctgccttgggagtttgccgcgagcgcgtctccttcattcgcaggctgggcgcgttcgcagtcggctggcggcgaaggaaggcgctctcgggacctcgcgggcgcgcgtcttttggctcttgcccctgtccctgcggcttggggaaggcgtaacccggcggctaggcgcgggagaagtgcggaggagccatgggcgccgggagctccaccgagcagcgcagcccggagcagccgcccgaggggagctccacgccggctgagcccgagcccagcggcggcggcccctcggccgaggcggcgccagacaccaccgcggaccccgccatcgctgcctcggaccccgccaccaagctcctacagaagaatggtcagctgtccaccatcaatggcgtagctgagcaagatgagctcagcctccaggagggtgacctaaatggccagaaaggagccctgaacggtcaaggagccctaaacagccaggaggaagaagaagtcattgtcacagaggttggacagagagactctgaagatgtgagcaaaagagactccgataaagagatggctactaagtcagcggttgttcacgacatcacagatgatgggcaggaggagacacccgaaataatcgaacagattccttcttcagaaagcaatttagaagagctaacacaacccactgagtcccaggctaatgatattggatttaagaaggtgtttaagtttgttggctttaaattcactgtgaaaaaggataagacagagaagcctgacactgtccagctactcactgtgaagaaagatgaaggggagggagcagcaggggctggcgaccacaaggaccccagccttggggctggagaagcagcatccaaagaaagcgaacccaaacaatctacagagaaacccgaagagaccctgaagcgtgagcaaagccacgcagaaatttctcccccagccgaatctggccaagcagtggaggaatgcaaagaggaaggagaagagaaacaagaaaaagaacctagcaagtctgcagaatctccgactagtcccgtgaccagtgaaacaggatcaaccttcaaaaaattcttcactcaaggttgggccggctggcgcaaaaagaccagtttcaggaagccgaaggaggatgaagtggaagcttcagagaagaaaaaggaacaagagccagaaaaagtagacacagaagaagacggaaaggcagaggttgcctccgagaaactgaccgcctccgagcaagcccacccacaggagccggcagaaagtgcccacgagccccggttatcagctgaatatgagaaagttgagctgccctcagaggagcaagtcagtggctcgcagggaccttctgaagagaaacctgctccgttggcgacagaagtgtttgatgagaaaatagaagtccaccaagaagaggttgtggccgaagtccacgtcagcaccgtggaggagagaaccgaagagcagaaaacggaggtggaagaaacagcagggtctgtgccagctgaagaattggttgaaatggatgcagaacctcaggaagctgaacctgccaaggagctggtgaagctcaaagaaacgtgtgtttccggagaggaccctacacagggagctgacctcagtcctgatgagaaggtgctgtccaaaccccccgaaggcgttgtgagtgaggtggaaatgctgtcatcacaggagagaatgaaggtgcagggaagtccactaaagaagctttttaccagcactggcttaaaaaagctttctggaaagaaacagaaagggaaaagaggaggaggagacgaggaatcaggggagcacactcaggttccagccgattctccggacagccaggaggagcaaaagggcgagagctctgcctcatcccctgaggagcccgaggagatcacgtgtctggaaaagggcttagccgaggtgcagcaggatggggaagctgaagaaggagctacttccgatggagagaaaaaaagagaaggtgtcactccctgggcatcattcaaaaagatggtgacgcccaagaagcgtgttagacggccttcggaaagtgataaagaagatgagctggacaaggtcaagagcgctaccttgtcttccaccgagagcacagcctctgaaatgcaagaagaaatgaaagggagcgtggaagagccaaagccggaagaaccaaagcgcaaggtggatacctcagtatcttgggaagctttaatttgtgtgggatcatccaagaaaagagcaaggagagggtcctcttctgatgaggaagggggaccaaaagcaatgggaggagaccaccagaaagctgatgaggccggaaaagacaaagagacggggacagacgggatccttgctggttcccaagaacatgatccagggcagggaagttcctccccggagcaagctggaagccctaccgaaggggagggcgtttccacctgggagtcatttaaaaggttagtcacgccaagaaaaaaatcaaagtccaagctggaagagaaaagcgaagactccatagctgggtctggtgtagaacattccactccagacactgaacccggtaaagaagaatcctgggtctcaatcaagaagtttattcctggacgaaggaagaaaaggccagatgggaaacaagaacaagcccctgttgaagacgcagggccaacaggggccaacgaagatgactctgatgtcccggccgtggtccctctgtctgagtatgatgctgtagaaagggagaaaatggaggcacagcaagcccaaaaaagcgcagagcagcccgagcagaaggcagccactgaggtgtccaaggagctcagcgagagtcaggttcatatgatggcagcagctgtcgctgacgggacgagggcagctaccattattgaagaaaggtctccttcttggatatctgcttcagtgacagaacctcttgaacaagtagaagctgaagccgcactgttaactgaggaggtattggaaagagaagtaattgcagaagaagaaccccccacggttactgaacctctgccagagaacagagaggcccggggcgacacggtcgttagtgaggcggaattgacccccgaagctgtgacagctgcagaaactgcagggccattgggtgccgaagaaggaaccgaagcatctgctgctgaagagaccacagaaatggtgtcagcagtctcccagttaaccgactccccagacaccacagaggaggccactccggtgcaggaggtggaaggtggcgtacctgacatagaagagcaagagaggcggactcaagaggtcctccaggcagtggcagaaaaagtgaaagaggaatcccagctgcctggcaccggtgggccagaagatgtgcttcagcctgtgcagagagcagaggcagaaagaccagaagagcaggctgaagcgtcgggtctgaagaaagagacggatgtagtgttgaaagtagatgctcaggaggcaaaaactgagccttttacacaagggaaggtggtggggcagaccaccccagaaagctttgaaaaagctcctcaagtcacagagagcatagagtccagtgagcttgtaaccacttgtcaagccgaaaccttagctggggtaaaatcacaggagatggtgatggaacaggctatcccccctgactcggtggaaacccctacagacagtgagactgatggaagcacccccgtagccgactttgacgcaccaggcacaacccagaaagacgagattgtggaaatccatgaggagaatgaggtcgcatctggtacccagtcagggggcacagaagcagaggcagttcctgcacagaaagagaggcctccagcaccttccagttttgtgttccaggaagaaactaaagaacaatcaaagatggaagacactctagagcatacagataaagaggtgtcagtggaaactgtatccattctgtcaaagactgaggggactcaagaggctgaccagtatgctgatgagaaaaccaaagacgtaccatttttcgaaggacttgaggggtctatagacacaggcataacagtcagtcgggaaaaggtcactgaagttgcccttaaaggtgaagggacagaagaagctgaatgtaaaaaggatgatgctcttgaactgcagagtcacgctaagtctcctccatcccccgtggagagagagatggtagttcaagtcgaaagggagaaaacagaagcagagccaacccatgtgaatgaagagaagcttgagcacgaaacagctgttaccgtatctgaagaggtcagtaagcagctcctccagacagtgaatgtgcccatcatagatggggcaaaggaagtcagcagtttggaaggaagccctcctccctgcctaggtcaagaggaggcagtatgcaccaaaattcaagttcagagctctgaggcatcattcactctaacagcggctgcagaggaggaaaaggtcttaggagaaactgccaacattttagaaacaggtgaaacgttggagcctgcaggtgcacatttagttctggaagagaaatcctctgaaaaaaatgaagactttgccgctcatccaggggaagatgctgtgcccacagggcccgactgtcaggcaaaatcgacaccagtgatagtatctgctactaccaagaaaggcttaagttccgacctggaaggagagaaaaccacatcactgaagtggaagtcagatgaagtcgatgagcaggttgcttgccaggaggtcaaagtgagtgtagcaattgaggatttagagcctgaaaatgggattttggaacttgagaccaaaagcagtaaacttgtccaaaacatcatccagacagccgttgaccagtttgtacgtacagaagaaacagccaccgaaatgttgacgtctgagttacagacacaagctcacgtgataaaagctgacagccaggacgctggacaggaaacggagaaagaaggagaggaacctcaggcctctgcacaggatgaaacaccaattacttcagccaaagaggagtcagagtcaaccgcagtgggacaagcacattctgatatttccaaagacatgagtgaagcctcagaaaagaccatgactgttgaggtagaaggttccactgtaaatgatcagcagctggaagaggtcgtcctcccatctgaggaagagggaggtggagctggaacaaagtctgtgccagaagatgatggtcatgccttgttagcagaaagaatagagaagtcactagttgaaccgaaagaagatgaaaaaggtgatgatgttgatgaccctgaaaaccagaactcagccctggctgatactgatgcctcaggaggcttaaccaaagagtccccagatacaaatggaccaaaacaaaaagagaaggaggatgcccaggaagtagaattgcaggaaggaaaagtgcacagtgaatcagataaagcgatcacaccccaagcacaggaggagttacagaaacaagagagagaatctgcaaagtcagaacttacagaatcttaaaacatcatgcagttaaactcattgtctgtttggaagaccagaatgtgaagacaagtagtagaagaaaatgaatgctgctgctgagactgaagaccagtatttcagaactttgagaattggagagcaggcacatcaactgatctcatttctagagagcccctgacaatcctgaggcttcatcaggagctagagccatttaacatttcctctttccaagaccaacctacaattttcccttgataaccatataaattctgatttaaggtcctaaattcttaacctggaactggagttggcaatacctagttctgcttctgaaactggagtatcattctttacatatttatatgtatgttttaagtagtcctcctgtatctattgtatatttttttcttaatgtttaaggaaatgtgcaggatactacatgctttttgtatcacacagtatatgatggggcatgtgccatagtgcaggcttggggagctttaagcctcagttatataacccacgaaaaacagagcctcctagatgtaacattcctgatcaaggtacaattctttaaaattcactaatgattgaggtccatatttagtggtactctgaaattggtcactttcctattacacggagtgtgctaaaactaaaaagcattttgaaacatacagaatgttctattgtcattgggaaatttttctttctaacccagtggaggttagaaagaagttatattctggtagcaaattaactttacatcctttttcctacttgttatggttgtttggaccgataagtgtgcttaatcctgaggcaaagtagtgaatatgttttatatgttatgaagaaaagaattgttgtaagtttttgattctactcttatatgctggactgcattcacacatggcatgaaataagtcaggttctttacaaatggtattttgatagatactggattgtgtttgtgccatatttgtgccattcttttaagaacaatgttgcaacacattcatttggataagttgtgatttgacgactgatttaaataaaatatttgcttcacttagatttgctggttttattagataccaggaagcctgggacatatgtgtaccacattagaattctaaagataatgattgataagctagaactttctgatgtagtcattacatgaaaccccttgtcactggtttgtgtgttcagaggaagccatggccgagatagctttcctgaaataaaccagtagcttttcagattgacgttcttgctacaattgtaccatctggtaattcctgaaaatgtcaatttttttgtgttaatatttttggtttcaaacaataacaaatgtctctagaaagaaattttaagaaagcttaattaatagtaaaaatgcctttcctgaaataatcttggaaaattttttaaatgtcaaaatgatgagtcatgctaatacattgagggtttgtttttttgtttgtttgtttgtttgtttttgagacagagtttcgctcttgttgcccaggctggagtgcaatggcacgatctcagctcaccgcaacctccacctcccggattccagcgattctcctgcctcagcctacattaagggttttgtcagacaattgtcacacgaagaatagtgtcacttatctactcttgacacacagaactggcctggcatatagctttccagattttactcaaacttggtactccagtttgaaaatttaaattttgactgctgattagctggaaagcctagttttaatggaaagaaagtttgcttttaaaactgaaagtagtttctttttgctaacaaatctaacttcatacataattggccatattagtaaaacacctcatgatagcagtgtatatatagtcttgtttgtagttggaagtcatcttttaggagttattctcaaatatatataatagctacccatgcatcattattaaaatccccaaattcaaaaaacctctgatatatatatataatttttttttttttttttttttggccaactgagattgaaatccaagtgctggtttctagttctgaacatcaactaaagagttttggaaatgacagcaatttataacaagttcatattgacttcctctctatggcaggaagacattctgtgctgttttgaacagattaaagatttgtgtagtttgtgggaaattgacgtttttgtttaaattccacccgcgtttgtcttttcctaccacctgtggccaggtgctcgctggccatcacagttgcgattccatgagtagctgctttatgactgctttttgtactatctggatgtgcccagagttacttctgtacaagctctgtatctatgtccgttgagaacattattttaacaagaagaacaccaacagtagcatgaaatataatactgttttataattctaaagctgctgttaatttatgaagtacataataatctaatgtaaactgcagaagtcagagcaagtgcctacattttgttatttttggcattactacagagccatgtacaatagaaagcaatgcaagacttgtaaactctcaccacttcttgtaatatcaaatgttccccctcaggttattttgcttatggtacccatgagttgcctctctctgtacatagataaattgttccaatattttcctttgatgtttggaactacagatagtcaagggctggaaattttagttttcaatataagcttccagcttagcaattacctctagtcgaagacaatatttgattcctagttctgtttggggcaaattttcatttatctaaataaaatgcaatctaattaaatgccatggattttctttctgtaaaaaaaaaaaaaaaaaa

SEQ ID NO: 205 - DNA, 5008 bp, Homo sapiens
gaggagggcggtgcgctgagaggttatttgtggttcgctttgatcccgagggggaacctgaaactctcacattcctggcatagcagccgcctccggcgcgggccgaccctggggctgcgcgctggggcgcgaacagccagagcgtcggcgccacggccgagaacacatcttcgccgccgagctgagctgggccgagccggaggttgtggtgtctgactgcgctgggcaccctcgggccgcagcggtgctctggggccaggtgccaccggccattgtccaggcagctgtgtgcaagccaaagaagcatgaggacactggaagactcctcggggacagtcctgcaccgcctcatccaggagcagctgcgctacggcaacctgactgagacgcgcacgctgctagccatccagcagcaggccctgaggggtggggctggaactgggggtacagggagcccccaggcctccctggagatcctggccccagaggacagtcaggtgctgcagcaggccaccaggcaggagccccagggccaggagcaccagggcggtgagaaccacctggcagagaacaccctctaccggctatgcccacagcccagcaagggagaggagctgcccacctatgaggaggccaaagcccactcgcagtactatgcggcccagcaggcagggacccggccacatgcgggggaccgagatccccgtggggccccgggaggcagtcggaggcaggacgaggccctgcgggagctgaggcatgggcacgtgcgctcgttgagtgaacggctccttcagttgtccctggagaggaacggcgcccgggcccccagccacatgagctcctcccacagcttcccacagctggcccgcaaccagcagggccccccactgaggggcccccctgctgagggcccagagtcccgaggacccccacctcagtaccctcatgttgtactagctcatgagaccaccactgctgtcactgacccacggtaccgtgcccgcggcagcccgcacttccagcatgctgaagtcaggatcctgcaggcccaggtgcctcctgtgttcctccaacagcagcagcagtaccagtacctgcagcaatctcaggagcacccccctcccccacatccagctgctctcggccatggccccctgagctccctcagtccacctgctgtggaggggccagtgagtgcccaggcctcctcagccacctcgggcagtgcccacctggcccagatggaggccgtgctgagggagaatgccaggctgcagagagacaatgagcggctgcagagggagctggagagctctgcggagaaggctggccgcattgagaagctggaaagcgaaatccagcggctctctgaggcccatgagagcctgaccagagcctcctccaagcgtgaggccctggagaagaccatgcggaacaagatggacagtgaaatgaggaggctgcaagacttcaaccgggatcttagagagagattggaatctgcaaatcgccgcctggcaagcaagacacaggaggcccaggccggcagtcaggacatggtggccaagctgcttgctcagagctacgaacagcagcaggagcaagagaagctggagcgagagatggcactgctgcgcggcgccatcgaggaccagcggcggcgtgccgagctgctggagcaggctctgggcaatgcgcagggccgggcagctcgagccgaagaggagctgcgcaagaagcaggcctatgtggagaaagtggagcggctgcagcaggcgctcgggcagctgcaggcagcctgtgagaagcgggagcagctggagctgcgtctgcggactcgcctggagcaggaactcaaggccctgcgtgcacagcagagacaggcaggtgccccaggtggtagcagtggcagtggtgggtctccagagctcagcgccctgcgactgtcagaacaactgcgagagaaggaggagcagatcctggcgctggaggccgacatgaccaagtgggagcagaagtatttggaggaacgtgccatgaggcagtttgccatggatgcggctgccacggctgctgctcagcgtgacaccactctcatccgacattccccccagccctcacccagcagcagcttcaatgagggtctgctcactggtggccacaggcatcaggagatggaaagcaggttaaaggtgctccatgcccagatcctggagaaggatgcagtgatcaaggtccttcagcagcgctccaggagagaccctggcaaggccatccagggctccctgcggcctgccaagtcggtgccatctgttttcgcggctgcggcagcaggaacccagggctggcaagggctctcttctagtgagcgacaaacagcagacgcccctgctcggctgactacagcagacagagcacccacagaggagccagtggtcacagctccccctgctgcccatgccaaacacgggagcagagatgggagcacccagactgagggccccccagacagcacctccacctgcctgccaccggagcctgacagccttctggggtgcagcagtagccagagagcagcctctctggactctgtagctacatccagagtccaggacttgtcagacatggtggagatactgatctgaaggaggtggtgcttcaggactctgagccattctctcccctcctctgccctgtgccactctcagccatttcagcagccccgtcaaccgctgctccgtccctttccccagccagacactcattcccattgaccatctggtcccaggagctcaggaggaggaccccaggggagaggagagctgtgagagcaccggcacccccagaagactctgcttcttagcccacattcctccgggccttatggagaatgaggattcagccttgacttcttgcccaaggcctgctactggggtagcaactgacagctcagaaaggagctgagctccctctgccctgccagttgtcagtcaggcagggagggagtggctgtgttggtttggggaactaatttccacggacggctgcccgtggacaccaggtggactggttcactaatcaagtcagccatattgttctctggctaagtttggttccagccaacgtcatctgctcttcagttcctcactgccttcttgggatactaagacttgaattttttggggactattaagggtgttagtcttggagaagacacagcctcaccttctcacttgctgtgggtgaggggccatttaagtggactgggagacagtgcgcagtttgtatataattccctttcttgtggaacagaagactgaggcctgcaggttccgatgtgtctccatgggctgtgctcccctcttcctactgtcagtttctgaaacttctgactggcctcccagttatgcctcctcctcaagttcctggcccgtggatgttaaagctgctcgattcccaggatctcggctgccttttcctctatcttgagccctataaatgcccacgggacccccaccaccagcctcttgaagtggctccacagctcctgtccctggaacatcctgtcagtttggtcataaaccctgagccagatgaaatgagccaccgtgaacagacatctgccatgcccccaggtgggcttcggtggccctacccggtaccagttctttctgagaaactggagatgtcttgttagcataagtgtcttcattcccacctggagggtttgggagaggagcaaagcagttgaaaactagttaatgagctacaagagtcaaatagtcctctgaatggagcccccatcacaaaacagtgcccaggaggctggctcctcaagctacccatgcccagcgccctaaagcagcaccagatgctttggaattggggtgaaacacccacatggcagcctgctagcagcagtgactttgacttctggtcttaaagagtccctcacttcagccccaggagctattggtgggttttagcagttttgtctttaccgtttttagttctccttgattctttgttttcttcctttatcgtttttaggtttggtatgtgttgttttatttccatggttcctcaagtttcctttttaaacatttgcatttgctggacaattgcaattttttttaaaaaattcccctacccctgtttaaagctgaaaaatacatttggttcatgtgcattgtttacaaagcaaaaagaaaaaagaggaaaaaaaggcaaaaaatattgtgaaagaaaaaaaacaacttaatatattttggattaatatttggtatttcttttaaagtattttttgtgctgtgaacattttctgccaaagaccatgatgtgtgtctgtatgtttaagttatcgtaaatatttaaaatgtaaacatggctgttttgttatgccaccctgtaccaggattgctgccgcattccactgggtataacagtattttaattaaaaaaaaataattaaaagtgatgtctttgcacaggtgagactttgcactgagggaagggaaagggtgaggattttggggggccacccaagtcatagtccaatctcttcaaggacccaagatagaatttaggaattttgtgaagctgcattaaggatagagttggaatgaggatgtggctggcatttttcccctttcatagataacatttcttgaaggctgggaggggaaggagggcctggcagatggcagcctcccgaggtagggctgtgttctaatcagctttgttcggccacacgctgtggttatccacagtgggagtgggtgtccaaagatggctttatccttcccccactccttttcccactcccacctagcacataaagttttgtccgaaaccatccagaaggccaggcaccatgcagaggacattcaagaatgtgcatgttcttagccaccgcctccctcctttgctgtgacatcaccactctttcctgatgctcaggaaagcatattgctccaattcaaaattaaagaaagccattctcagt

SEQ ID NO: 206 - DNA, 4178 bp, Homo sapiens
agcttttagccgcccgtctttgtaaggagaccactgagacgagcgggagcgcggagcagcagcctctgctgccctgactttttaagaaatctcaatgaactatttgtagagaatcactgatccggcctgcaagcattttgcacggcaaaaatatcgatcagtgttaagtgaagatcacattttatatgcgatcttgacttttttgtcttacattatatttttatagattttgttataaacatggtgctgggaaaggtgaagagtttgacaataagctttgactgtcttaatgacagcaatgtccctgtgtattctagtggggataccgtctcaggaagggtaaatttagaagttactggggaaatcagagtaaaatctcttaaaattcatgcaagaggacatgcgaaagtacgctggactgaatctagaaacgccggctccaatactgcctatacacagaattacactgaagaagtagagtatttcaaccataaagacatcttaattgggcacgaaagagatgatgataattccgaagaaggcttccacactattcattcaggaaggcatgaatatgcattcagcttcgagcttccacagacaccactcgctacctcattcgaaggccgacatggcagtgtgcgctattgggtgaaagccgaattgcacaggccttggctactaccagtaaaattaaagaaggaatttacagtctttgagcatatagatatcaacactccttcattactgtcaccccaagcaggcacaaaagaaaagacactctgttgctggttctgtacctcaggcccaatatccttaagtgccaaaattgaaaggaagggctataccccaggtgaatcaattcagatatttgctgagattgagaactgctcttcccgaatggtggtgccaaaggcagccatttaccaaacacaggccttctatgccaaagggaaaatgaaggaagtaaaacagcttgtggctaacttgcgtggggaatccttatcatctggaaagacagagacgtggaatggcaagttgctgaaaattccaccagtttctccctctatcctcgactgtagtataatccgcgtggaatattcactaatggtatatgtggatattcctggagctatggatttatttcttaatttgccacttgtcatcggtaccattcctctacatccatttggtagcagaacctcaagtgtaagcagtcagtgtagcatgaatatgaactggctcagtttatcacttcctgaaagacctgaagcaccacccagctatgcagaagtggtaacagaggaacaaaggcggaacaatcttgcaccagtgagtgcttgtgatgactttgagagagcccttcaaggaccactgtttgcatatatccaggagtttcgattcttgcctccacctctttattcagagattgatccaaatcctgatcagtcagcagatgatagaccatcctgcccctctcgttgaaggaacacttggttgaatcaagttgatgtgggttccgaactgtatctcttccggctgaggacagagaagtatcttggagacacgtttcagaggaagtggaattacttttgcccagaaaaatggcgaatacatgaaacaaccagtgatcatgctttagaagcctacagcaacattctgagactgctccaacatgcttgaagatctaagcttttctcttttaaaactggcacatactcagagcagtcttcttagcctatggtcgtacgtgtcaagacatcacgttgtaaagagggatgatttccttcttttgatttgaaaatttgcacatgctcaatgcttacattgtgcggttcgacgtcactacagcttctttttttttttttttttttttctatttttgccagactcttgatactcttaaaacttgtttgtggtcagcacaacaaggaacaaaacaaagctttgaaaaaactttaacatgaaaaaacgcactgacatttttttttatttaatatagcctggactttacctgcgtatgcacatgctcagaattgtctactaggctgactatgtatcacctcttcagcttggatccaattgtggatttatttacaaacatcaaatgccttcaagccaatcctttttgctgtatgttttgcagcctactgtagtagatacgcaacagataatgtgggaaaaaaagagataagaggaggaagctaataagagactgtcaagattgtataccttcttggtttcttttaagaatttgttgcctttctactattacagcaaagcagcattttgttactgactgcctaaaatcacttaatctcaggtgaacgcatcacttgccaaactgttggaatgctatttgtgttttgttgcactgtttttttcgtttgtttgtttgtttatttggttggctttttggagagggaaatttggaaacgggacatacacaaaagttacacacccacattccctttttatcatgacatacaagaagaaactagcagagctaagaatggagtgaagaaaggcagtatggcaggcaccagcaaagagttgagggctgttgctcttaaaaattattttttttattattattttgaaagtatggaagttttccattcactggggaaaggagggaaaagtgcatttatttttatacagagttacttaattacctccaaaacacatatgttggaaatcgcttttgctggtgcaaagtatattaatgagcaggaatacatacattgaggttatgaatagagagctcaatttgtacctttgctgtcttgctcaagcttggtatggcatgaaaactcgactttattccaaaagtaacttcaaaatttaaaatactagaacgtttgctgcgataaatcttttggatttttgtgtttttctaatgagaatactgtttttcattacctaaagaacaatttgctaaacatgagaaatcactcactttgattatgtatagattacataggaagaacaatcacatcagtaagttatagtttatattaaaggtaattttctgttggctcataacaaatataccagcattcatgatagcatttcagcattttccaaggtaccaagtgtacttattttgttgttgttgttgttgttgtattttagaaggaattcagctctgatgtttttaaagaaaaccagcatctctgatgttgcaacatacgtgtaaaatgggtgttacatctatcctgccatttaaccccacagttaataaagtggctgaaaataatagtagctctggcttggtgcttgacctggttaaatactgtcttaaagctcatacaaaacaaataggcttttccataagtggcctttaagaaaacatggaagacaattcatgtttgacaaatgctgacagggtgaagaaagcccagtgtaaaaatgaatcgcgttttaagtgattcggttaaagagtttgggctcccgtagcaaactaatactagataataaggaaatgggggtgaaatatttttttattgttgaatcattttgtgaatgtccccctcaaaaaaagctaatggaatatttggcataaagggcatttggtggttttatttttgtttgagggggattgtcagaaaatcccttttctctcttacgtctaactgactagggaacaattgttgatatgcatagcattggaatacttgtcattatatactcttacaaataacacatgaagcaagaatgaccaatattctgataattggcactggatcacaaaatgtgataaaactttaaatgtataaaactttatcaaataaagttttattttcccctttaaaatgtatttctttagaggcattacttttttaaaaatattggtcaattcctgacataagatgtgaggttcacagttgtattccagtattcaagatagattcctgatttttcaattaggaaaagtaaaatccaaaatgttagcaaaacaaagtgcaatattaaatgtttgctttatagattatattctatggctgtttgtaatttctctttttttccttttttatttggtgctgaatatgtccttgtaggctctgttttaagaaaacaatatgtgggaaatgatttaatttttcctattgctcttccttgtggaaaataaagtgttttgtttttttctgttttgtataaaaaaaaaaaaaaaaaaa

SEQ ID NO: 207 - DNA, 4074 bp, Homo sapiens
gacaggcctctcggcgagccggtgccccatcgggtaccgcacggctgccgcggcggccttaccctgccgcgagcgcctgtgacagcggcgccgctgtgctcgcgaccccggctccgggcctctgccgacctcaggggcaggaaagagtcgcccggcgggatgggcggggaggctgggtgcgcggcggccgtgggtgccgagggccgcgtgaagagcctgggtctggtgttcgaggacgagcgcaagggctgctattccagcggcgagacagtggccgggcacgtgctgctggaggcgtccgagccggtggccctgcgcgcgctgcgcctggaggcccaggggcgcgccaccgccgcctggggcccgagcacctgcccccgcgcctcggccagcaccgcggccctggctgtcttctcggaggtggagtacctgaacgtgcgcctcagcctgcgggagcccccggccggtgaaggcatcattttattacagcctggaaaacatgaatttccatttcgctttcaacttccatctgaacctttggtcacctcgtttactgggaaatatggaagcattcagtactgtgtgcgggcagtgttggaacgacccaaggtacctgatcagagtgtaaagcgggaactccaggttgttagtcatgtcgatgtcaacacaccagcattattaacccctgtattgaaaactcaagagaaaatggttggctgttggtttttcacttctggtccagtctcgctgagtgccaaaattgaaagaaagggatactgtaatggagaagctattccaatctatgcagaaatagaaaattgttcctctcgtctgattgttccaaaggctgctattttccaaacgcagacatatttggctagtggaaaaacaaagaccattcgacacatggtcgccaatgtgcgaggaaaccacatcgcttctgggagcacagacacatggaatgggaaaacgctaaaaatcccacctgttactccatccatcctggattgctgcattatcagagtggactattccttagctgtatacattcacattcctggtgctaaaaaattgatgctcgaactgccattagtgatcggtacaattccatataatggttttggcagcagaaactccagcattgccagccagttcagtatggatatgagctggttgacactgaccctgccagagcagcctgaagcaccaccaaattatgcagatgtggtatcagaggaagaattctctagacacattcctccttaccctcaaccccctaactgtgagggagaagtgtgctgtcctgtgtttgcctgtatacaagaattccggtttcaacccccacctctttattcagaggttgacccacatcctagcgacgtagaagagagccagcctgtttccttcattctctgaacgtatttcagaaatcactgtgttcatcatcaaattagaatgttggttcttttccttctgcctttttgggaaagagacaggaaagattcacttgaaaacataaatgaacgtcaagactgaaggcaatagaaattaaagaatgtgagaaagttctggtgggccggcaggattgccgcacaagtttatatgatggtcgtatatatatccctgttaaaaactgggatgaagatgtgcaaagtcacagaatgtaatggaagtcctgatggttacagagtaagtgaaagggtgcctgcgctgacgtgagagaaaggaatctgtaaacagtggaaacactgtgggagtttcccatggtgaagagtggaacgaaggcgatatgaactgaaggggtgaagacttgattttggagagggcaacaaaacaagggtgtgtgtgcataggagaatggcccactccaaatacgaagtgagatcctgagtctttgggtgcttcatgatttcctaccatattcaggcctaaagacattgaaaaagcatcttttcttgagatcatggtcatatgaggtcctaatgaagtactacagttttcattctttcaagggtagactaaaatatagtttataaatcggcagtacggtattatgaaaccaagaaagggtttcttgaaaagcttgtcggttcaaagaggaaagatgaatttcaatgtgaaaacacgttttgttgagggctgtactttttaccccctttaagtgctttaacaggatatacgtttgattttcctcatatcttatttacctaggagcatgtaagagaaagaagggagagaaaaggttgcatctgcaggatgccttgataactacacagtcccaaataaaaggcctttttctaacctacctctaatggggttatcagatatgtttttaaatctctcgccctgagtactcttcttgggagttgctgctgtttacagccacagtctcatctatcactaaatatgaaactgggccaaggggaaaattcagtaagttagcgttaaatggaagtaaatatatgtatacctaagagaatgtcaaaataaacaccaaaccaaaagaaggtaggagtgccatttttagaaaagacacaactttaattcctgtcaagagacctaggtctactgatggcagtcactgcattgtacattattccagttcttcagtaattctgtttaaactgtgattttctttattgtgttggtgcaatattttattatcatttaacctcaggatattcagaccaacaggattgtgttgctgctgaaagtctgagcagtgttttaccgtccccagcccccctcccacatggtcacatgttcacttgcttttccttccatctgttggttttgtgagctgagagcatctctggacacatggaagggagccagggattcctgtgatacagattttgaaccagcagagtactttggttttcttcatgtcctaagggtttgatccagaaaccctggtgcttcccctgcagaatactgtacttcatttaacagaatgattgatttttctttcaatcagcatgttcaccaaaaatagaaaagttcttctaaggttaaattttgtatttaaaagttagttggccatttgatcagggaattttctacacacattaggcaaatgtatgcttttcatcctctgggcttacctctctcctctgcaatcctggaagcatcgtgcatagttctttcattgtaagccgctatttaaattcccacaatgcaaaactgttagaccagtaattgtgctactgaaattgtcacaaaacgttattccttgatttggtttttaaattttgctttcgtgtgtgtgtctttaaacaggtaatgtgtatttaagtgttgtctaaacagttgatttttactttagaaaagatcatcttcaactgtttattgacttctgagttatatagttcatgccctgccaaggcattgttcgactccatgatactaaaacataatgaaagaaacaaactccagtatggagaagagaaagtttaattatttggttccatctagaaaagcaacaacttaaaggaatccttcactaggattgtcttatcacctttattagataaatcatgaagtgtccctgtgaaattgaagtgaaactatctctgtaggacttaagagaatagctaaaaggtgtgacttgccttattgaaatgatactggcatatctgactgtaagcagtaggttgaagatatcattttatgaatgtggagaattctacattgaaacagaaaatacctgggaatgaagattaaaaatgtagctgctgttatttgcttggttattcccctcttgctcttctttagtttgaaaaaacaaaaacgtggccttggaattttcattttgatgcagaaattttgaaattgaaaatgtgcatgttttggtgcacaaaatccttctgtgggcaaaactttgtttttgttttgcacagtaagaaacaataggcaagcgttatgtttttggtaagttaactatgaaagctttcttatttttattattaaaaatgtaacaatttaacccacaggaaaaaaaattactttgtatgcttgtttgaaccctatgggttcgttttattaataaaattattacactaatgctaaaaaaaa

SEQ ID NO: 208 - DNA, 6031 bp, Homo sapiens
cttttcccatcgtgtagtcaagagtctgtgccagacttgaaggctttactttgttagccatgtgtttatgaacccccagcgctttccctagatcttttggctgataatctcaaacatggaggatgcttctgaatcttcacgaggggttgctccattaattaataatgtagttctcccaggctctccgctgtctcttcctgtatcagtgacaggctgtaaaagtcatcgagtagccaataaaaaggtagaagcgaggagtgaaaagctcctcccaacagctcttcctccttcagagccgaaagtagatcagaaacttcccaggagctccgagaggcggggaagtggcggtgggacgcaattccccgcgcggagtcgggcagtggcagcgggagaagcggcagccaggggcgcggcggggccggagagaggcggtcccctgggaggacggggtctcccctcgttgcctttgtagtggagaaggtggacaagtggcagtcggcgtgatcgcagggaagcggggccggcgcgggcggccgagggtccaggcgagcccgcgggcggacgggagatgccgctgctacaccgaaagccgtttgtgagacagaagccgcccgcggacctgcggcccgacgaggaagttttctactgtaaagtcaccaacgagatcttccgccactacgatgacttttttgaacgaaccattctgtgcaacagccttgtgtggagttgtgctgtgacgggtagacctggactgacgtatcaggaagcacttgagtcagaaaaaaaagcaagacagaatcttcagagttttccagaaccactaattattccagttttatacttgaccagccttacccatcgttcgcgcttacatgaaatttgtgatgatatctttgcatatgtcaaggatcgatattttgtcgaagaaactgtggaagtcattaggaacaatggtgcaaggttgcagtgtaggattttggaagtcctccctccatcacatcaaaatggttttgctaatggacatgttaacagtgtggatggagaaactattatcatcagtgatagtgatgattcagaaacacaaagctgttcttttcaaaatgggaagaaaaaagatgcaattgatcccttactattcaagtataaagtgcaacccactaaaaaagaattacatgagtctgctattgttaaagcaacacaaatcagccggagaaaacacctattttctcgtgataaactaaagctttttctgaagcaacactgtgaaccacaagatggagtcattaaaataaaggcatcatctctttcaacgtataaaatagcagaacaagatttttcttatttcttccctgatgatccacccacatttatcttcagtcctgctaacagacgaagagggagacctcccaaacgaatacatattagtcaagaggacaatgttgctaataaacagactcttgcaagttataggagcaaagctactaaagaaagagataaacttttgaaacaagaagaaatgaagtcactggcttttgaaaaggctaaattaaaaagagaaaaagcagatgccctagaagcgaagaaaaaagaaaaagaagataaagagaaaaagagggaagaattgaaaaaaattgttgaagaagagagactaaagaaaaaagaagaaaaagagaggcttaaagtagaaagagaaaaggaaagagagaagttacgtgaagaaaagcgaaagtatgtggaatacttaaaacagtggagtaaacctagagaagatatggaatgtgatgaccttaaggaacttccagaaccaacaccagtgaaaactagactacctcctgaaatctttggtgatgctctgatggttttggagttccttaatgcatttggggaactttttgatcttcaagatgagtttcctgatggagtaaccctagaagtattagaggaagctcttgtaggaaatgacagtgaaggcccactgtgtgaattgctttttttcttcctgactgcaatcttccaggcaatagctgaagaagaagaggaagtagccaaagagcaactaactgatgctgacaccaaagatttaacagaggctttggatgaagatgcagaccccacaaaatctgcactgtctgcagttgcatctttggcagctgcatggccacagttacaccagggctgcagtttgaaaagtttggatcttgatagctgcactctttcagaaatcctcagactgcacatcttagcttcaggtgctgatgtaacatcagcaaatgcaaagtatagatatcaaaaacgaggaggatttgatgctacagatgatgcttgtatggagcttcgtttgagcaatcccagtctagtgaagaaactgtcaagcacctcagtgtatgatttgacaccaggagaaaaaatgaagatactccatgctctctgtggaaagctactgaccctagtttcaactagggattttattgaagattatgttgatatattacgacaggcaaagcaggagttccgggaattaaaagcagaacaacatcgaaaagagagggaagaagcagctgccagaattcgtaaaaggaaggaagaaaaacttaaggagcaagaacaaaaaatgaaagagaaacaagaaaaactgaaagaagatgagcaaagaaattcaacggcagatatatctattggggaggaagaaagggaagattttgatactagcattgagagcaaagacacagagcaaaaggaattagatcaagatatggtcactgaagatgaagatgacccaggatcacataaaagaggcagaagggggaaaagaggacaaaatggatttaaagaatttacaaggcaagaacagatcaactgtgtaacaagagagcctcttactgctgatgaggaagaagcattaaaacaggaacaccaacgaaaagagaaagagctcttagaaaaaatccaaagtgccatagcctgtaccaatatctttcccttgggtcgcgaccgcatgtatagacgatactggattttcccttctattcctggactctttattgaagaggattattctggtcttactgaagacatgctgttgcctagaccttcatcatttcagaataatgtacagtctcaagatcctcaggtatccactaaaactggagagcctttgatgtctgaatctacctccaacattgaccaaggtccacgtgaccattctgtgcagctgccaaaaccagtgcataagccaaatcggtggtgcttttacagttcttgtgaacagctagaccagcttattgaagctcttaattctagaggacatagagaaagtgccttaaaagaaactttgttacaagagaaaagcagaatatgtgcacagctagcccgtttttctgaagagaaatttcatttttcagacaaacctcagcctgatagcaaaccaacatatagtcggggaagatcttccaatgcatatgatccatctcagatgtgtgcagaaaagcaacttgaactaaggctgagagattttcttttagatattgaagatagaatctaccaaggaacattaggagccatcaaggttacagatcgacatatctggagatcagcattagaaagtggacggtatgagctgttaagtgaggaaaacaaggaaaatgggataattaaaactgtgaatgaagacgtagaagagatggaaattgatgaacaaacaaaggtcatagtaaaagacagacttttggggataaaaacagaaactccaagtactgtatcaacaaatgcaagtacaccacaatcagtgagcagtgtggttcattatctggcaatggcactctttcaaatagagcagggcattgagcggcgttttctgaaagctccacttgatgccagtgacagtgggcgttcttataaaacagttctggaccgttggagagagtctctcctttcttctgctagtctatcccaagtttttcttcacctatccaccttggatcgtagcgtgatatggtctaaatctatactgaatgcgcgttgcaagatatgtcgaaagaaaggcgatgctgaaaacatggttctttgtgatggctgtgataggggtcatcatacctactgtgttcgaccaaagctcaagactgtgcctgaaggagactggttttgtccagaatgtcgaccaaagcaacgttctagaagactctcctctagacagagaccatccttggaaagtgatgaagatgtggaagacagtatgggaggtgaggatgatgaagttgatggcgatgaagaagaaggtcaaagtgaggaggaagagtatgaggtagaacaagatgaagatgactctcaagaagaggaagaagtcagcctacccaaacgaggaagaccacaagttagattgccagttaaaacaagagggaaacttagctcttctttctcaagtcgtggccaacaacaagaacctggaagatacccttcaaggagtcagcagagcacacccaaaacaactgtttcttctaaaactggtagaagcctaagaaagataaactctgctcctcctacagaaacaaaatctttaagaattgccagtcgttctactcgccacagtcatggcccactgcaagcagatgtatttgtggaattgcttagtcctcgtagaaaacgcagaggcaggaaaagtgctaataatacaccagaaaatagtcccaacttccctaacttcagagtcattgccacaaagtcaagtgaacagtcaagatctgtaaatattgcttcaaaactttctctccaagagagtgaatccaaaagaagatgcagaaaaagacaatctccagagccatcgcctgtgacactgggtcgaaggagttctggccgacagggaggagttcatgaattgtctgcttttgaacaacttgttgtagaattggtacgacatgatgacagctggccttttttgaaacttgtttctaaaatccaggtcccagactactatgacatcatcaaaaagcccattgccttaaatataattcgtgaaaaagtgaataagtgtgaatataaattagcatctgagtttattgatgacattgagttaatgttttcgaactgctttgaatacaaccctcgtaacacaagtgaagcaaaagctggaactaggcttcaagcattttttcatattcaggctcaaaagcttggactccacgtcacacccagtaatgtggaccaagttagcacaccaccggctgcgaaaaagtcacgaatctgactttgtccttctaaaggatatatttgaagaaaaacaaattgttcatgaaaatggaacattaaatcatgctgtataaagcaataacaattgattgaccacatgaaagtgtggcctgcactatattctcaattttaatattaagcactcaggagaatgtaggaaagatatcctttgctacagttttgttcagtatctaataagtttgatagatgtattggatacagtactggtttacagaggtttttgtacatttttgagatcattcatgtgtccagagatcttggaaaatattttttcacccacgatttattttgttattgatgatttttttttaaagtggtggtattaagggagagttatctacatggatgagtcttccgctatagcacagtttagaaaaggtgtttatgtcttaattaattgtttgagtacattctttcaacactacacatgaatgaatccaatcttataaccttgaagtgctgtaccagtgctggctgcaggtattaagtccaagtttattaactagatatttatttagtattgagagtaatttgtgaatttgttttgtatttataaaatttatacctgaaaaatgttccttaatgttttaaaccttttactgtgtttttattcctctaacttccttaatgatcaatcaaaaaaagtaacaccctccctttttcctgacagttctttcagctttacagaactgtattataagtttctatgtataactttttaactgtacaaataaaataacattttttcaaataaaaaaaaaaaaaaaaa

SEQ ID NO: 209 - DNA, 6932 bp, Homo sapiens
gcatttaaaagacagcgtgagactcgcgccctccggcacggaaaaggccaggcgacaggtgtcgcttgaaaagactgggcttgtccttgctggtgcatgcgtcgtcggcctctgggcagcaggtttacaaaggaggaaaacgacttcttctagatttttttttcagtttcttctataaatcaaaacatctcaaaatggagacctaaaatccttaaagggacttagtctaatctcgggaggtagttttgtgcatgggtaaacaaattaagtattaactggtgttttactatccaaagaatgctaattttataaacatgatcgagttatataaggtataccataatgagtttgattttgaatttgatttgtggaaataaaggaaaagtgattctagctggggcatattgttaaagcatttttttcagagttggccaggcagtctcctactggcacattctcccattatgtagaatagaaatagtacctgtgtttgggaaagattttaaaatgagtgacagttatttggaacaaagagctaataatcaatccactgcaaattaaagaaacatgcagatgaaagttttgacacattaaaatacttctacagtgacaaagaaaaatcaagaacaaagctttttgatatgtgcaacaaatttagaggaagtaaaaagataaatgtgatgattggtcaagaaattatccagttatttacaaggccactgatattttaaacgtccaaaagtttgtttaaatgggctgttaccgctgagaatgatgaggatgagaatgatggttgaaggttacattttaggaaatgaagaaacttagaaaattaatataaagacagtgatgaatacaaagaagatttttataacaatgtgtaaaatttttggccagggaaaggaatattgaagttagatacaattacttacctttgagggaaataattgttggtaatgagatgtgatgtttctcctgccacctggaaacaaagcattgaagtctgcagttgaaaagcccaacgtctgtgagatccaggaaaccatgcttgcaaaccactggtaaaaaaaaaaaaaaaaaaaaaaaaaagccacagtgacttgcttattggtcattgctagtattatcgactcagaacctctttactaatggctagtaaatcataattgagaaattctgaattttgacaaggtctctgctgttgaaatggtaaatttattattttttttgtcatgataaattctggttcaaggtatgctatccatgaaataatttctgaccaaaactaaattgatgcaatttgattatccatcttagcctacagatggcatctggtaacttttgactgttttaaaaaataaatccactatcagagtagatttgatgttggcttcagaaacatttagaaaaacaaaagttcaaaaatgttttcaggaggtgataagttgaataactctacaatgttagttctttgagggggacaaaaaatttaaaatctttgaaaggtcttattttacagccatatctaaattatcttaagaaaatttttaacaaagggaatgaaatatatatcatgattctgtttttccaaaagtaacctgaatatagcaatgaagttcagttttgttattggtagtttgggcagagtctctttttgcagcacctgttgtctaccataattacagaggacatttccatgttctagccaagtatactattagaataaaaaaacttaacattgagttgcttcaacagcatgaaactgagtccaaaagaccaaatgaacaaacacattaatctctgattatttattttaaatagaatatttaattgtgtaagatctaatagtatcattatacttaagcaatcatattcctgatgatctatgggaaataactattatttaattaatattgaaaccaggttttaagatgtgttagccagtcctgttactagtaaatctctttatttggagagaaattttagattgttttgttctccttattagaaggattgtagaaagaaaaaaatgactaattggagaaaaattggggatatatcatatttcactgaattcaaaatgtcttcagttgtaaatcttaccattattttacgtacctctaagaaataaaagtgcttctaattaaaatatgatgtcattaattatgaaatacttcttgataacagaagttttaaaatagccatcttagaatcagtgaaatatggtaatgtattattttcctcctttgagttaggtcttgtgcttttttttcctggccactaaatttcacaatttccaaaaagcaaaataaacatattctgaatatttttgctgtgaaacacttgacagcagagctttccaccatgaaaagaagcttcatgagtcacacattacatctttgggttgattgaatgccactgaaacattctagtagcctggagaagttgacctacctgtggagatgcctgccattaaatggcatcctgatggcttaatacacatcactcttctgtgaagggttttaattttcaacacagcttactctgtagcatcatgtttacattgtatgtataaagattatacaaaggtgcaattgtgtatttcttccttaaaatgtatcagtataggatttagaatctccatgttgaaactctaaatgcatagaaataaaaataataaaaaatttttcattttggcttttcagcctagtattaaaactgataaaagcaaagccatgcacaaaactacctccctagagaaaggctagtcccttttcttccccattcatttcattatgaacatagtagaaaacagcatattcttatcaaatttgatgaaaagcgccaacacgtttgaactgaaatacgacttgtcatgtgaactgtaccgaatgtctacgtattccacttttcctgctggggttcctgtctcagaaaggagtcttgctcgtgctggtttctattacactggtgtgaatgacaaggtcaaatgcttctgttgtggcctgatgctggataactggaaaagaggagacagtcctactgaaaagcataaaaagttgtatcctagctgcagattcgttcagagtctaaattccgttaacaacttggaagctacctctcagcctacttttccttcttcagtaacaaattccacacactcattacttccgggtacagaaaacagtggatatttccgtggctcttattcaaactctccatcaaatcctgtaaactccagagcaaatcaagatttttctgccttgatgagaagttcctaccactgtgcaatgaataacgaaaatgccagattacttacttttcagacatggccattgacttttctgtcgccaacagatctggcaaaagcaggcttttactacataggacctggagacagagtggcttgctttgcctgtggtggaaaattgagcaattgggaaccgaaggataatgctatgtcagaacacctgagacattttcccaaatgcccatttatagaaaatcagcttcaagacacttcaagatacacagtttctaatctgagcatgcagacacatgcagcccgctttaaaacattctttaactggccctctagtgttctagttaatcctgagcagcttgcaagtgcgggtttttattatgtgggtaacagtgatgatgtcaaatgcttttgctgtgatggtggactcaggtgttgggaatctggagatgatccatgggttcaacatgccaagtggtttccaaggtgtgagtacttgataagaattaaaggacaggagttcatccgtcaagttcaagccagttaccctcatctacttgaacagctgctatccacatcagacagcccaggagatgaaaatgcagagtcatcaattatccattttgaacctggagaagaccattcagaagatgcaatcatgatgaatactcctgtgattaatgctgccgtggaaatgggctttagtagaagcctggtaaaacagacagttcagagaaaaatcctagcaactggagagaattatagactagtcaatgatcttgtgttagacttactcaatgcagaagatgaaataagggaagaggagagagaaagagcaactgaggaaaaagaatcaaatgatttattattaatccggaagaatagaatggcactttttcaacatttgacttgtgtaattccaatcctggatagtctactaactgccggaattattaatgaacaagaacatgatgttattaaacagaagacacagacgtctttacaagcaagagaactgattgatacgattttagtaaaaggaaatattgcagccactgtattcagaaactctctgcaagaagctgaagctgtgttatatgagcatttatttgtgcaacaggacataaaatatattcccacagaagatgtttcagatctaccagtggaagaacaattgcggagactacaagaagaaagaacatgtaaagtgtgtatggacaaagaagtgtccatagtgtttattccttgtggtcatctagtagtatgcaaagattgtgctccttctttaagaaagtgtcctatttgtaggagtacaatcaagggtacagttcgtacatttctttcatgaagaagaaccaaaacatcgtctaaactttagaattaatttattaaatgtattataactttaacttttatcctaatttggtttccttaaaatttttatttatttacaactcaaaaaacattgttttgtgtaacatatttatatatgtatctaaaccatatgaacatatattttttagaaactaagagaatgataggcttttgttcttatgaacgaaaaagaggtagcactacaaacacaatattcaatcaaaatttcagcattattgaaattgtaagtgaagtaaaacttaagatatttgagttaacctttaagaattttaaatattttggcattgtactaataccgggaacatgaagccaggtgtggtggtatgtgcctgtagtcccaggctgaggcaagagaattacttgagcccaggagtttgaatccatcctgggcagcatactgagaccctgcctttaaaaacaaacagaacaaaaacaaaacaccagggacacatttctctgtcttttttgatcagtgtcctatacatcgaaggtgtgcatatatgttgaatgacattttagggacatggtgtttttataaagaattctgtgagaaaaaatttaataaagcaacaaaaattactcttattcttcattgctttatttcaatgacattggatagtttagtcactcccagactctttccataccttcttaaagcctctcaaatattgaactacagtttatactccttcccataagatgcttcttcattgacacttgtagaacacggggtcaacacatcataaaatctattatggaatgcctgagacaagaatcaaacagtccctttagtaagtttgtttattcacttctctattgattcattcaagaagtctcatgccagccccacctattggaagaaggtctgagttttattcttatctctttggtattaattctgaaacttagaaagtacactggttagcaatgcttgggaccaacaggttgttctggtaaataaatctgtttcatattgtcagtgcaacaaaatgtccccctctgcattatgttattggtactcaacacgtccgagtcataactctgtcctttgcttcttatagaggtattaggtcttcaagagcagaagtaagactgtaatagggaatactcaggggaaggcaggcaaaggctagtcatctaaaccagttctagatgtctgtataggggcagatggctctgtaagggcagaagggaaagaccccttcataagggtcacagctgacaatcctataacaaaagacaggttaacaagagaaaaacttaacaaatttatttaatcacagatttacatcaccggggagccttcgtaatgaagatccaaaattacaggggaaactgtgcatttttatgcttaggtttgataatgaatggacagccctgaagaatagtgattggaaaaaaaggatatgatctaatgggaatagacacaggttggggacccagcaaggcctgtctgttcagattattcttggtctctgtgcagcattccttcctcctggatatagggcagggcctgtatgggatggggatattataacctgctatcaagcaaggtaggtcagagaatttatttatggccagctcttacatagttaggtgaggaaagattagagtactatctttaagatgtaagtctggcattgtggaaagatggttccagtttctatgacctaccttggggaagaggaattcaagtttctgtggcttgccttcagggagaatgaggctgagacaggagggcaggataacatcagagaaaaactttgcttctgaggccttcactttgggttttctgagccccaacatctgctagtgttgtaaagagaacaattagggaccaagtgaggggaggaaagaatccatctctgcattctgatgctgggagacttatttccttgaaatgcaattgattttgcctctgctaagaggctctgctggctacccatgtactagccagtgtcctgcatgggtgctaggctgaattatttgtaattgtgcttaggtgatttgtaactcaggtatagggtatttaaatagtaggcaccctttttgcaccatgtgtttttttttttatctagttcttgtatactacagataatatttgaactttgtcatctcactgtaaaacttttgttcatttctcattatggtaataaatagctattataaccaacccatttattcaaatatgttatttccctaagtgttattttgacattttgttttggaaaaaataaatcaccatagataataaaaaaaaaaaaaaaaaaaaaaa

SEQ ID NO: 210 - DNA, 2296 bp, Homo sapiens
gaggcggggaggtcgctcgactcgccggcgctgtggcctcccgcggagccgctcagactttccctgccggcacatggacctggcccaaccctcacagccagtagacgagctggagctctcggtgctcgagcggcagccagaagagaacacgcctctcaatggtgccgacaaggtcttcccttctttggacgaggaggtccccccggccgaggctaacaaggaaagcccctggagctcctgtaataagaatgtggttggaagatgcaaactgtggatgatcatcacctccattttcctaggtgtcattacagtgatcatcataggcttatgtcttgctgcagtaacttatgttgatgaagatgaaaatgaaatacttgaattatcatcaaacaaaacattcttcatcatgctgaagattccagaggagtgtgttgctgaagaggaattgcctcacctgctcaccgaaaggctcacagatgtgtacagtacatcgccctctctgagtcgttattttacttcagttgaaatagtggacttcagtggtgaaaatgccacagtaacgtatgacctgcaatttggggttccatcagatgatgaaaattttatgaagtatatgatgagtgaggagttggtgctgggcattttgctacaggatttccgtgatcagaatatacctggttgtgagagtctggggcttgatccaacatccctcttgctctatgaatgaagtgatggaggctggtctctgtctgaaagcagtgctctaccaagtcctggagatgaagggaattcactctgttttgcagaaaagattctgtggattaatacagaagcaccagcaacaccagaggggtggagactcctttctctcccgattctacagtctggctctaagcccagtaaaacagctcccgagcactgcttcagctgggtccagtcttgacaaaggcaggaagccagctagggtgggggcgatagggtcagcgggtatgtcccactgttggaggtcactggtattctgtttgtttttgttttgtttcgttttgttttttgagacagggtctcgttctgtcgcttagctggagtgcggtggcgtgatcatggcactgctattcttgaagcactccacccacctgggctactttttctttagtgcagaggtgcactgtcttcttttaggtgggatcgcgtaagcatgagctggtagagcacggagaggcaggcagccaggttacgaagactaagccaattattcactgaagtcatcctcctcccccccaccattcgatttgatctacctctaagccaggctgtgaagaaaaggaaggcactttagaagacctcagcagtgtggttctgtgtctacttccatgacctgtacctgagtatcttagccagccagccttaggaacaccaccaaggttactttgaaatctatgtatatagctagttacagacgggagctatgtgtttcttcattattttgcagctcctcgttgttcctgtgattcctgaacacctttttggaaatatgggtctctgtgagttttgagcacactactatcactttggatagtcactccatttatatttttataaacttccattagagaatcattaaggctgtttaatatctgctctggatattacgcattggctttttgttgcctagtgctacaaaccttcctgtgggactcagtgtcttcaggcaatgattgtgtatcctgttacagatggttgtgatacaagaagaaccactcttctttgaaaataaactcttggaagcttttgccagctatttggggggtaggaggaatattagcaactgtattggttgtctacagatacagaattgcctgttgtgagggaactgattgttttgttgggaaaagaaatttaccaggagaaagagttttgtgctgtattgtgagagatctcgcctctcagttaaatgagccctgggttaaagtcagtgtgaagggcagctgtgtgcgggcacgagccagagtgtctgcctcagactagatttgacttgagttctttatgacccaggactctggataatgtgaatttgctttcctatttaactagaagatacatgtactatagatcattgtctcattttagtgattgttccttaaactagtgaaactagtggatttctcttcttcctctttattttctgcatgttaaatgtgaaccttagtgtatttgtattttgtagaaaataatgaaaaattttaatggagaatgatttaaaaacatttacaatacattaaaaaaaaaaaaaaaaaaa

SEQ ID NO: 211 - DNA, 2296 bp, Homo sapiens; identical to SEQ ID NO: 210

SEQ ID NO: 212 - DNA, 11628 bp, Homo sapiens
aacctctccgcgcgaagacggcttcagccctgcagggaaagaaaagtgcaatgattctggactgagacgcgcttgggcagaggctatgtaatcgtgtctgtgttgaggacttcgcttcgaggagggaagaggagggatcggctcgctcctccggcggcggcggcggcggcgactctgcaggcggagtttcgcggcggcggcaccagggttacgccagccccgcggggaggtctctccatccagcttctgcagcggcgaaagccccagcgcccgagcgcctgagccggcggggagcaagtaaagctagaccgatctccggggagccccggagtaggcgagcggcggccgccagctagttgagcgcaccccccgcccgccccagcggcgccgcggcgggcggcgtccaggcggcatggagaaggacggcctgtgccgcgctgaccagcagtacgaatgcgtggcggagatcggggagggcgcctatgggaaggtgttcaaggcccgcgacttgaagaacggaggccgtttcgtggcgttgaagcgcgtgcgggtgcagaccggcgaggagggcatgccgctctccaccatccgcgaggtggcggtgctgaggcacctggagaccttcgagcaccccaacgtggtcaggttgtttgatgtgtgcacagtgtcacgaacagacagagaaaccaaactaactttagtgtttgaacatgtcgatcaagacttgaccacttacttggataaagttccagagcctggagtgcccactgaaaccataaaggatatgatgtttcagcttctccgaggtctggactttcttcattcacaccgagtagtgcatcgcgatctaaaaccacagaacattctggtgaccagcagcggacaaataaaactcgctgacttcggccttgcccgcatctatagtttccagatggctctaacctcagtggtcgtcacgctgtggtacagagcacccgaagtcttgctccagtccagctacgccacccccgtggatctctggagtgttggctgcatatttgcagaaatgtttcgtagaaagcctctttttcgtggaagttcagatgttgatcaactaggaaaaatcttggacgtgattggactcccaggagaagaagactggcctagagatgttgcccttcccaggcaggcttttcattcaaaatctgcccaaccaattgagaagtttgtaacagatatcgatgaactaggcaaagacctacttctgaagtgtttgacatttaacccagccaaaagaatatctgcctacagtgccctgtctcacccatacttccaggacctggaaaggtgcaaagaaaacctggattcccacctgccgcccagccagaacacctcggagctgaatacagcctgaggcctcagcagccgccttaagctgatcctgcggagaacacccttggtggcttatgggtccccctcagcaagccctacagagctgtggaggattgctatctggaggccttccagctgctgtcttctggacaggctctgcttctccaaggaaaccgcctagtttactgttttgaaatcaatgcaagagtgattgcagctttatgttcatttgtttgtttgtttgtctgtttgtttcaagaacctggaaaaattccagaagaagagaagctgctgaccaattgtgctgccatttgatttttctaaccttgaatgctgccagtgtggagtgggtaatccaggcacagctgagttatgatgtaatctctctgcagctgccgggcctgatttggtacttttgagtgtgtgtgtgcatgtgtgtgtgtgtgtgtgtgtgtgtgtgtgtgtatgtgagagattctgtgatcttttaaagtgttactttttgtaaacgacaagaataattcaattttaaagactcaaggtggtcagtaaataacaggcatttgttcactgaaggtgattcaccaaaatagtcttctcaaattagaaagttaaccccatgtcctcagcatttcttttctggccaaaagcagtaaatttgctagcagtaaaagatgaagttttatacacacagcaaaaaggagaaaaaattctagtatattttaagagatgtgcatgcattctatttagtcttcagaatgctgaatttacttgttgtaagtctattttaaccttctgtatgacatcatgctttatcatttcttttggaaaatagcctgtaagctttttattacttgctataggtttagggagtgtacctcagatagattttaaaaaaaagaatagaaagcctttatttcctggtttgaaattcctttcttccctttttttgttgttgttattgttgtttgttgttgttattttgtttttgtttttaggaatttgtcagaaactctttcctgttttggtttggagagtagttctctctaactagagacaggagtggccttgaaattttcctcatctattacactgtactttctgccacacactgccttgttggcaaagtatccatcttgtctatctcccggcacttctgaaatatattgctaccattgtataactaataacagattgcttaagctgttcccatgcaccacctgtttgcttgctttcaatgaacctttcataaattcgcagtctcagcttatggtttatggcctcgattctgcaaacctaacagggtcacatatgttctctaatgcagtccttctacctggtgtttacttttgttacctaaataatgagtaggatcttgttttgttttatcaccagcacacagattgctataaactgttactttgtgaattacatttttatagaagatattttcagtgtctttacctgagggtatgtctttagctatgttttagggccatacatttactctatcaaatgatcttttctccatcccccaggctgtgcttatttctagtgccttgtgctcactcctgctctctacagagccagcctggcctgggcattgtaaacagcttttcctttttctcttactgttttctctacagtcctttatatttcataccatctctgccttataagtggtttagtgctcagttggctctagtaaccagaggacacagaaagtatcttttggaaagtttagccacctgtgctttctgactcagagtgcatgcaacagttagatcatgcaacagttagattatgtttagggttaggattttcaaagaatggaggttgctgcactcagaaaataattcagatcatgtttatgcattattaagttgtactgaattctttgcagcttaatgtgatatatgactatcttgaacaagagaaaaaactaggagatgtttctcctgaagagcttttggggttgggaactattcttttttaattgctgtactacttaacattgttctaattcagtagcttgaggaacaggaacattgttttctagagcaagataataaaggagatgggccatacaaatgttttctactttcgttgtgacaacattgattaggtgttgtcagtactataaatgcttgagatataatgaatccacagcattcaaggtcaggtctactcaaagtctcacatggaaaagtgagttctgcctttcctttgatcgagggtcaaaatacaaagacatttttgctagggcctacaaattgaatttaaaaactcactgcactgattcatctgagctttttggttagtattcatggctagagtgaacatagctttagtttttgctgttgtaaaagtgttttcataagttcactcaagaaaaatgcagctgttctgaactggaatttttcagcattctttagaattttaaatgagtagagagctcaacttttattcctagcatctgcttttgactcatttctaggcagtgcttatgaagaaaaattaaagcacaaacattctggcattcaatcgttggcagattatcttctgatgacacagaatgaaagggcatctcagcctctctgaactttgtaaaaatctgtccccagttcttccatcggtgtagttgttgcatttgagtgaatactctcttgatttatgtattttatgtccagattcgccatttctgaaatccagatccaacacaagcagtcttgccgttagggcattttgaagcagatagtagagtaagaacttagtgactacagcttattcttctgtaacatatggtttcaaacatctttgccaaaagctaagcagtggtgaactgaaaagggcatattgccccaaggttacactgaagcagctcatagcaagttaaaatattgtgacagatttgaaatcatgtttgaatttcatagtaggaccagtacaagaatgtccctgctagtttctgtttgatgtttggttctggcggctcaggcattttgggaactgttgcacagggtggagtcaaaacaacctacatataaaaagagaaaaagagaaacttgtccatttagctttcataagaaatcccatggcaaagggtaataaaaaggacctaatcttaaaaatacaatttctaagcacttgtaagaacccagtgggttggagcctcccactttgtccctcctttgaagtggatgggaactcaaggtgcaaagaacctgttttggaagaaagcttggggccatttcagccccctgtattctcatgattttctctcaggaagcacacactgtgaatggcagacttttcatttagccccaggtgacttactaaaaatagttgaaaattattcacctaagaatagaatctcagcattgtgttaaataaaaatgaaagctttagaaggcatgagatgttcctatcttaaataaagcatgtttcttttctatagagaaatgtatagtttgactctccagaatgtactatccatcttgatgagaaaactcttaaatagtaccaaacattttgaactttaaattatgtatttaaagtgagtgtttaagaaactgtagctgcttcttttacaagtggtgcctattaaagtcagtaatggccattattgttccattgtggaaattaaattatgtaagcttcctaatatcataaacatattaaaattcttctaaaatattgcttttcttttaagtgacaatttgactattcttatgataagcacatgagagtgtcttacattttccaaaagcaggctttaattgcatagttgagtctaggaaaaaataatgttaaaagtgaatatgccaccataattacttaattatgttagtatagaaactacagaatatttaccctggaaagaaaatattggaatgttattataaactcttagatatttatataattcaaaagaatgcatgtttcacattgtgacagataaagatgtatgatttctaaggctttaaaaattattcataaaacagtgggcaatagataaaggaaattctggagaaaatgaaggtatttaaagggtagtttcaaagctatatatattttgaaggatatattctttatgaacaaatatattgtaaaaatttatactaaggtcatctggtaactgtgggattaatatggtcgaaaacaaatgttatggagaagctgtcccaagcaaactaaattacctgtacttttttcccatttcaagggaagaggcaaccacatgaagcaatacttcttacacatgcctaagaacgttcattgaaaaaataaatttttaaaaggcatgtgtttcctatgccaccaatacttttgaaaaattgtgaaccttacccaaaaccatttatcatgtccattaagtatatttgggtatataattaggaagatatttacatgttccatctccacagtggaaaaacttattgaggctaccaaagtgtgccaagaaatgtaagtccttagagtaattagaaatgctgttttcctcaaaagcatgagaaactagcattttcatttcttatttactccctttctatatcaatgcaattcacaacccaattttaatacatccctatatctcaagcatttctatcttgtactttttcagaaaataaaccaaaaataatcctttggtctctctatcttctgacctttgtaagcaacagaaatgtaaaaacagaaggggtccaatttttacacgtttttttctcaagtagcctttctggggatttttattttcttaatgaagtgccaatcagcttttcaaaatgttttctatttctcagcatttccaggaagtgataacgtttagctaaatgagtagaagtggacttccttcaacatattgttaccttgtctagccttaggaagaaaacaagagccacctgaaaataaatacaggctcttttcgagcatctgctgaaatactgttacagcaatttgaagttgatgtggtaggaaaggaaggtgacttttcttgcaaaagtctttctaaacattcacactgtcctaagagatgagctttcttgttttattccggtatattccacaaggtggcacttttagagaaaaacaaatctgatgaagactaaagaggtacttctaaaagagatttcattctaactttatttttctgcgcatatttaactctttcctagcacttgttttttgggatgattaatagtctctataatgttctgtaacttcaatattttacttgttacctaggttctgaacaattgtctgcaaataaattgttcttaaggatggataatacacccattttgatcatttaagtaaagaaagcctagtcattcattcagtcaagaaaaaatttttgaagtacccagttaccttacttttctagattaaaacaggcttagttactaaaaaggcagtcctcatctgtgaacaggatagtttcgttagaagtataaaactcctttagtggccccagttaaaacacacataccctctctgctgctttcaaattccctagcatggtggcctttcaacattgattaaattttaaaatcctaatttaaagatcaggtgagcaaaatgagtagcacatcagtaattcagtagacaaaacttttgtctgaaaaattgctgtattgaaacagagccctaaaataccaaaagaccaggtaattttaacatttgtggaatcacaaatgtaaattcataagaagctctaattaaaaaaaaaaagtctgaagtatatgagcataacaacttaggagtgtgtctacatacttaacttttgaagttttttggcaactttatatactttttttaaatttacaagtctacttaaagacttcttataccccaaatgattaagttaattttagaggtcacctttctcacagcagtgtcacttgaaatttagtagggaaggatattgcagtatttttcagtttccttagcacagcaccacagaaagcagcttattccttttgagtggcagacactcgacggtgcctgcccaactttcctcctgagtggcaagcagatgagtctcagtaattcatactgaaccaaaatgccacatacactaggggcagtcagaaactggctgagaaatcccccgcctcattcgcccctctgctcccaggaactagagtccagttaaagcccctatgcgaaaggccgaattccaccccagggtttgttataacagtggccagtctgaaccccatttgctcgtgctcaaaacttgattcccacttgaaagccttccgggcgcgctgcctcgttgccccgcccctttggcaggagagaggcagtgggcgaggccgggctggggccccgcctcccactcacctgccggtgcctgaaattatgtgcggccccgcgggctgctttccgaggtcagagtgccctgctgctgtctcagaggcatctgttctgcaaatcttaggaagaaaaatgtccctagtagcaaacgggtgtcttctgtgcataaataagtacaacacaattctccgaaagttcgggtaaaaagagatgcggtagcagctgccctgtgtgaagctgtctaccccgcatctctcaggcgctaagctcagtttttgtttttgtttttgtttttttaaagaaaagatgtataattgcaggaatttttttttatttttttattttccatcattctatatatgtgatggtgaaagatatgcctggaaaagttttgttttgaaaagtttattttctgcttcgtcttcagttggcaaaagctctcaattctttagcttccagtttcttttctctctttttctttgttaggtaattaaaggtatgtaaacaaattatctcatgtagcaggggattttcatgttgagaggaatcttccgtgtgagttgtttggtcacacaaataaccctttctcaattttaggagtttggattgtcaaatgtaggtttttctcaaagggggcatataactacatattgactgccaagaactatgactgtagcactaatcagcacacatagagccacacaattatttaatttctaactctctgtggtccctagaaaaattccgttgatgtgcttaggttaaagttctgaagatacccgttgtacccttacttgaaagtttctaatcttaagttttatgaaatgcaataatatgtatcagctagcaatatttctgtgatcaccaacaactctcagtttgatcttaaagtctgaataataaaacaaatcccagcagtaatacatttcttaaacctcacagtgcatgatatatcttttcattctgatcctgtgtttgcaaaaatatacacatgtatatcatagttcctcactttttattcatttgttttcctattacctgtagtaaatatattagttagtacatggaatttatagcatcagctacccccaggaacagcacctgacaggcgggggattttttttcaagttgttctacatttgcataaattatttctattattattcatgtatgttatttatttctgaatcacactagtcctgtgaaagtacaactgaaggcagaaagtgttaggattttgcatctaatgttcattatcatggtattgatggacctaagaaaataaaaattagactaagcccccaaataagctgcatgcatttgtaacatgattagtagatttgaatatatagatgtagtattttgggtatctaggtgttttatcattatgtaaaggaattaaagtaaaggactttgtagttgtttttattaaatatgcatatagtagagtgcaaaaatatagcaaaaataaaaactaaaggtagaaaagcattttagatatgccttaatttagaaactgtgccaggtggccctcggaatagatgccaggcagagaccagtgcctgggtggtgcctcctcttgtctgccctcatgaagaagcttccctcacgtgatgtagtgccctcgtaggtgtcatgtggagtagtgggaacaggcagtactgttgagaggagagcagtgtgagagtttttctgtagaagcagaactgtcagcttgtgccttgaggcttccagaacgtgtcagatggagaagtccaagtttccatgcttcaggcaacttagctgtgtacagaagcaatccagtgtggtaataaaaagcaaggattgcctgtataatttattataaaataaaagggattttaacaaccaacaattcccaacacctcaaaagcttgttgcattttttggtatttgaggtttttatctgaaggttaaagggcaagtgtttggtatagaagagcagtatgtgttaagaaaagaaaaatattggttcacgtagagtgcaaattagaactagaaagttttatacgattatcattttgagatgtgttaaagtaggttttcactgtaaaatgtattagtgtttctgcattgccatagggcctggttaaaactttctcttaggtttcaggaagactgtcacatacagtaagcttttttccttctgacttataatagaaaatgttttgaaagtaaaaaaaaaaaatctaatttggaaatttgacttgttagtttctgtgtttgaaatcatggttctagaaatgtagaaattgtgtatatcagatactcatctaggctgtgtgaaccagcccaagatgaccaacatccccacacctctacatctctgtcccctgtatctcttcctttctaccactaaagtgttccctgctaccatcctggcttgtccacatggtgctctccatcttcctccacatcatggaccacaggtgtgcctgtctaggcctggccaccactcccaacttgacctagccacattcatctagagatggttcctgatgctgggcacagactgtgctcatggcacccattagaaatgcctctagcatctttgtatgcatcttgatttttaaaccaagtcattgtacagagcattcagttttggctgtggtaccaagagaaaaactaatcaagaatataaaccacattccaggctgctgttttctctccatctacaggccacacttttactgtatttcttcatacttgaaattcattctgctattttcatatcagggtacagacttataagggtgcatgttccttaaaggtgcataattattcttattccgtttgcttatattgctacagaatgctctgttttggtgctttgagttctgcagacccaagaagcagtgtggaaattcactgcctgggacacagtcttataagaatgttggcaggtgactttgtatcagatgttgcttctcttttctctgtacacagattgagagttaccacagtggcctgtcgggtccaccctgtgggtgcagcacagctctctgaaagcaagaaccttcctacctattctaacgtttttgccctctaagaaaaatggcctcaggtatggtatagacatagcaagaggggaagggctgtctcactctagcaaccatccctccattacacacagaaagccctcttgaagcaaaagaagaagaaagaaagaaagcttatctctaaggctactgtcttcagaatgctctgagctgaatgctcttgctcctttcccaagaggcagatgaaaatatagccagtttatctatacccttcctatctgaggaggagaatagaaaagtagggtaaatatgtaacgtaaaatatgtcattcaaggaccaccaaaactttaagtaccctatcattaaaaatctggttttaaaagtagctcaagtaagggatgctttgtgacccagggtttctgaagtcagatagccattcttacctgccccttactctgacttattgggaaagggagaactgcagtggtgtttctgttgcagtggcaaaggtaacatgtcagaaaattcagagggttgcataccaataatcctttggaaactggatgtcttactgggtgctagaatgaaaatgtaggtatttattgtcagatgatgaagttcattgtttttttcaaaattggtgttgaaatatcactgtccaatgtgttcacttatgtgaaagctaaattgaatgaggcaaaaagagcaaatagtttgtatatttgtaataccttttgtatttcttacaataaaaatattggtagcaaataaaaataataaaaacaataactttaaactgctttctggagatgaattactctcctggctattttcttttttactttaatgtaaaatgagtataactgtagtgagtaaaattcattaaattccaagttttagcagaaaaaaaaaaaaaaaaaa

SEQ ID NO: 213 - DNA, 2702 bp, Homo sapiens
gccaaagtgccacgttgggcccggcggcggcgtgaagactggcggctgcgtgagactccggctccaggcgttcgcaccgtaatgcccggccgttggggccgtcggtaggcgcgaggcgagtcgaggcagccggccggtcggcggccgccggcgggaacggggctgaggcggcgcagcggagtctgggcggcggcgcgtcccgcccgagggcggctctggctgagggcggaggggccggggaagagcccggggcagcggctgaggcgggacggcggcgggggccgctgcccctagaagacccagccgagatgctggcggaaaacctggtagaggagtttgagatgaaggaggacgagccgtggtacgaccaccaggacctccagcaagatcttcaacttgctgctgagcttgggaagacattactggatcggaacacagagttggaggactctgttcagcagatgtatacaaccaatcaggagcagttacaggaaattgagtatctgacgaagcaagtggaacttctacggcagatgaacgaacaacatgcaaaggtttatgaacaattagacgtcacagcaagggaactggaagaaacaaatcaaaagctagttgctgacagcaaggcctcacagcaaaagattctgagcctgactgaaacgattgaatgcctgcaaaccaacattgatcacctccagagccaagtggaggagctgaagtcatctggccaagggagaaggagcccgggaaagtgtgaccaggagaaaccggcacccagctttgcatgtctgaaggagctgtatgacctccgccaacacttcgtgtatgatcatgtgttcgctgagaagatcacttccttgcaaggtcagccaagccctgatgaagaggaaaatgagcacttgaaaaaaacagtgacaatgttgcaggcccagctgagcctggagcggcagaagcgggtgactatggaggaggaatatgggctcgtgttaaaggagaacagtgaactggagcagcagctgggggccacaggtgcctaccgagcacgggcgctggaactagaggccgaggtggcagagatgcgacagatgttgcagtcagagcatccatttgtgaatggagttgagaagctggtgccagactctctgtatgttcctttcaaagagcccagccagagcctgctggaagagatgttcctgactgtgccggaatcacatagaaagcctctcaagcgcagcagcagtgagacgatcctcagcagcttggcagggagtgacatcgtgaagggccacgaggagacctgcatcaggagggccaaggctgtgaaacagaggggcatctcccttctgcacgaagtggacacgcagtacagcgccctgaaggtgaagtatgaagagttgctgaagaagtgccaagaggaacaggactccctgtcacacaaggctgtgcagacctccagggctgcagccaaggacctgactggagtgaacgcccagtctgagcctgttgccagcggctgggaactggcctctgtcaacccagagcccgtgagttcccctacaacacctccagaatacaaagcgttgtttaaggagatctttagttgcatcaagaaaactaagcaggaaatagatgaacagagaacaaaataccgatcactctcctctcattcttaattgaacctctagctctactactaatttgcctattgcctatcgcctctctctcccattcagacaagtgtttgtagactctgaagcctaatgttactcatgacgtttgcctcattgctttgcttatttagcaaatgcatacaacgaggaaaggaggtggctagtggtatcagttctctgatccacttccatttaagctccccaggaaatcccatgacaaactggcctctggctggcgcgctgattagacttcagttcctgaaaaggaccagtggagggaagagctatacttctggagaagtaggcctggagttactacagtatgggggaaaagggtcgagttagaacaaagctaaggcaattcctattgcttccttgcgcaacttctcaaaacgatgaaagtcagaaggctgtcaaactcaaatatctttgcaaacagtttgaatactgtgaattcattacgaagaatgttcgagagaaagcaggggtctaatccaaaagaaatgtcattaaccaatactccaagtccttgagttttgttatatctgaactagttgaactgtgactgacaggtaatcctaatatatccaaatccaactgaataccaaattgagatggcaaatttttgtttgatataagttagcttgttagcatatgccctagagggcctccatccctgtattctaatgtttttactcaaagctctagcctttaggataggtgaatatgtaaatcttttatcactttctcaaattcaaactaaaggggaaagatcaaaccccttcccttcctacctgttttctgagctggctgacttgccagccacaagctgctcttgcagagttcttaccattcctgtaaatgttttgacttgttgcagaaattcctatctactttattaagcagtattgatctgactgtggaaacatcctctcacttgcattcttttaacttaaaactatttaagaactgatgttccgattattgtatatatttttctaaaaaccaaataaagctacctatgaaaatgaa

SEQ ID NO: 214 - DNA, 1178 bp, Homo sapiens
gtagccggctgctcccgctgcgggtggctcgggctgttgctgtggtttcctgagttgctgctgctgcggcggcggcagcggcgtctgtgcttgtggaggtgtcggcctctgggcggatgttgacattgtgttgttgttattgctgatggtaatggcggcggcggtggcggcgacggtccagaccccatcccctctgtagccggagccgagacagccgacagcgaactccgcggcctcggagccggcggcagcggcgactcccctcagcctccgccgcctcgcccgccggtaccccggcgccaaccccgggagtcaggccctttgggcaggggagctcggaggctcaggatggcggatttcgacgaaatctatgaggaagaggaggacgaggagcgggccctggaggagcagctgctcaagtactcgccggacccggtggtcgtccgcggctccggtcacgtcaccgtatttggactgagcaacaaatttgaatctgaattcccttcttcattaactggaaaagtagctcctgaagaatttaaagccagcatcaacagagttaacagttgtcttaagaagaaccttcctgttaatgtacgttggctactttgtggctgcctttgttgctgctgcacattaggttgcagtatgtggccagttatttgcctcagtaaaagaacacgaagatcgattgagaagttattagaatgggaaaacaataggttataccacaagctgtgcttgcattggagactgagcaaaaggaaatgtgaaacgaataacatgatggaatatgtcatcctcatagaatttttaccaaagacaccgatttttcgaccagattagcatttactttatttatagagactttccaagtatgttgtctttccaatggtgccttgcttggtgctctcctggtggtgacataacattggttctacagaatcgtgtggtgttttttttgtttttgtttttgttttttttttaaataaccgcatgttctaagtgtgcatttttgtcaatctttgcaacagttatttcatacagatgtttaatacttaagttattgtgctcttttctgttatgtattctgattttcaaggattacttttttgtattatcaaaaaaatacatttgaacttagcataaaaaaaaaaaaaaaaaaaaaaaaaaaaaaa

SEQ ID NO: 215 - DNA, 5628 bp, Homo sapiens
gcaggggagggcgcccgccccgctcccggcccggctgcgaggaggaggcggcggcggcgcaggaggatgtacttggtggcgggggacagggggttggccggctgcgggcacctcctggtctcgctgctggggctgctgctgctgctggcgcgctccggcacccgggcgctggtctgcctgccctgtgacgagtccaagtgcgaggagcccaggaactgcccggggagcatcgtgcagggcgtctgcggctgctgctacacgtgcgccagccagaggaacgagagctgcggcggcaccttcgggatttacggaacctgcgaccgggggctgcgttgtgtcatccgccccccgctcaatggcgactccctcaccgagtacgaagcgggcgtttgcgaagatgagaactggactgatgaccaactgcttggttttaaaccatgcaatgaaaaccttattgctggctgcaatataatcaatgggaaatgtgaatgtaacaccattcgaacctgcagcaatccctttgagtttccaagtcaggatatgtgcctttcagctttaaagagaattgaagaagagaagccagattgctccaaggcccgctgtgaagtccagttctctccacgttgtcctgaagattctgttctgatcgagggttatgctcctcctggggagtgctgtcccttacccagccgctgcgtgtgcaaccccgcaggctgtctgcgcaaagtctgccagccgggaaacctgaacatactagtgtcaaaagcctcagggaagccgggagagtgctgtgacctctatgagtgcaaaccagttttcggcgtggactgcaggactgtggaatgccctcctgttcagcagaccgcgtgtcccccggacagctatgaaactcaagtcagactaactgcagatggttgctgtactttgccaacaagatgcgagtgtctctctggcttatgtggtttccccgtgtgtgaggtgggatccactccccgcatagtctctcgtggcgatgggacacctggaaagtgctgtgatgtctttgaatgtgttaatgatacaaagccagcctgcgtatttaacaatgtggaatattatgatggagacatgtttcgaatggacaactgtcggttctgtcgatgccaagggggcgttgccatctgcttcaccgcccagtgtggtgagataaactgcgagaggtactacgtgcccgaaggagagtgctgcccagtgtgtgaagatccagtgtatccttttaataatcccgctggctgctatgccaatggcctgatccttgcccacggagaccggtggcgggaagacgactgcacattctgccagtgcgtcaacggtgaacgccactgcgttgcgaccgtctgcggacagacctgcacaaaccctgtgaaagtgcctggggagtgttgccctgtgtgcgaagaaccaaccatcatcacagttgatccacctgcatgtggggagttatcaaactgcactctgacagggaaggactgcattaatggtttcaaacgcgatcacaatggttgtcggacctgtcagtgcataaacaccgaggaactatgttcagaacgtaaacaaggctgcaccttgaactgtcccttcggtttccttactgatgcccaaaactgtgagatctgtgagtgccgcccaaggcccaagaagtgcagacccataatctgtgacaagtattgtccacttggattgctgaagaataagcacggctgtgacatctgtcgctgtaagaaatgtccagagctctcatgcagtaagatctgccccttgggtttccagcaggacagtcacggctgtcttatctgcaagtgcagagaggcctctgcttcagctgggccacccatcctgtcgggcacttgtctcaccgtggatggtcatcatcataaaaatgaggagagctggcacgatgggtgccgggaatgctactgtctcaatggacgggaaatgtgtgccctgatcacctgcccggtgcctgcctgtggcaaccccaccattcaccctggacagtgctgcccatcatgtgcagatgactttgtggtgcagaagccagagctcagtactccctccatttgccacgcccctggaggagaatactttgtggaaggagaaacgtggaacattgactcctgtactcagtgcacctgccacagcggacgggtgctgtgtgagacagaggtgtgcccaccgctgctctgccagaacccctcacgcacccaggattcctgctgcccacagtgtacagatcaaccttttcggccttccttgtcccgcaataacagcgtacctaattactgcaaaaatgatgaaggggatatattcctggcagctgagtcctggaagcctgacgtttgtaccagctgcatctgcattgatagcgtaattagctgtttctctgagtcctgcccttctgtatcctgtgaaagacctgtcttgagaaaaggccagtgttgtccctactgcatagaagacacaattccaaagaaggtggtgtgccacttcagtgggaaggcctatgccgacgaggagcggtgggaccttgacagctgcacccactgctactgcctgcagggccagaccctctgctcgaccgtcagctgcccccctctgccctgtgttgagcccatcaacgtggaaggaagttgctgcccaatgtgtccagaaatgtatgtcccagaaccaaccaatatacccattgagaagacaaaccatcgaggagaggttgacctggaggttcccctgtggcccacgcctagtgaaaatgatatcgtccatctccctagagatatgggtcacctccaggtagattacagagataacaggctgcacccaagtgaagattcttcactggactccattgcctcagttgtggttcccataattatatgcctctctattataatagcattcctattcatcaatcagaagaaacagtggataccactgctttgctggtatcgaacaccaactaagccttcttccttaaataatcagctagtatctgtggactgcaagaaaggaaccagagtccaggtggacagttcccagagaatgctaagaattgcagaaccagatgcaagattcagtggcttctacagcatgcaaaaacagaaccatctacaggcagacaatttctaccaaacagtgtgaagaaaggcaactaggatgaggtttcaaaagacggaagacgactaaatctgctctaaaaagtaaactagaatttgtgcacttgcttagtggattgtattggattgtgacttgatgtacagcgctaagaccttactgggatgggctctgtctacagcaatgtgcagaacaagcattcccacttttcctcaagataactgaccaagtgttttcttagaaccaaagtttttaaagttgctaagatatatttgcctgtaagatagctgtagagatatttggggtggggacagtgagtttggatggggaaatgggtgggagggtggtgttgggaagaaaaattggtcagcttggctcggggagaaacctggtaacataaaagcagttcagtggcccagaggttatttttttcctattgctctgaagactgcactggttgctgcaaagctcaggcctgaatgagcaggaaacaaaaaaggccttgcgacccagctgccataaccaccttagaactaccagacgagcacatcagaaccctttgacagccatcccaggtctaaagccacaagtttcttttctatacagtcacaactgcagtaggcagtgaggaagccagagaaatgcgatagcggcatttctctaaagcgggttattaaggatatatacagttacactttttgctgcttttattttcttccaagccaatcaatcagccagttcctagcagagtcagcacatgaacaagatctaagtcatttcttgatgtgagcactggagcttttttttttttacaacgtgacaggaagaggagggagagggtgacgaacaccaggcatttccaggggctatatttcactgtttgttgttgctttgttctgttatattgttggttgttcatagtttttgttgaagctctagcttaagaagaaactttttttaaaaagactgtttggggattctttttccttattatatactgattctacaaaatagaaactacttcattttaattgtatattattcaagcacctttgttgaagctcaaaaaaaatgatgcctctttaaactttagcaattataggagtatttatgtaactatcttatgcttcaaaaaacaaaagtatttgtgtgcatgtgtatataatatatatatatacatatatatttatacacatacaatttatgttttcctgttgaatgtatttttatgagattttaaccagaacaaaggcagataaacaggcattccatagcagtgcttttgatcacttacaaattttttgaataacacaaaatctcattctacctgcagtttaattggaaagatgtgtgtgtgagagtatgtatgtgtgtgtgtgtgtgtgtgtgtgtgcgcgcgcacgcacgccttgagcagtcagcattgcacctgctatggagaagggtattcctttattaaaatcttcctcatttggatttgctttcagttggttttcaatttgctcactggccagagacattgatggcagttcttatctgcatcactaatcagctcctggattttttttttttttttttcaaacaatggtttgaaacaactactggaatattgtccacaataagctggaagtttgttgtagtatgcctcaaatataactgactgtatactatagtggtaacttttcaaacagcccttagcacttttatactaattaacccatttgtgcattgagttttcttttaaaaatgcttgttgtgaaagacacagatacccagtatgcttaacgtgaaaagaaaatgtgttctgttttgtaaaggaactttcaagtattgttgtaaatacttggacagaggttgctgaactttaaaaaaaattaatttattattataatgacctaatttattaatctgaagattaaccatttttttgtcttagaatatcaaaaagaaaaagaaaaaggtgttctagctgtttgcatcaaaggaaaaaaagatttattatcaaggggcaatatttttatcttttccaaaataaatttgttaatgatacattacaaaaatagattgacatcagcctgattagtataaattttgttggtaattaatccattcctggcataaaaagtctttatcaaaaaaaattgtagatgcttgctttttgttttttcaatcatggccatattatgaaaatactaacaggatataggacaaggtgtaaatttttttattattattttaaagatatgatttatcctgagtgctgtatctattactcttttactttggttcctgttgtgctcttgtaaaagaaaaatataatttcctgaagaataaaatagatatatggcacttggagtgcatcatagttctacagtttgtttttgttttcttcaaaaaagctgtaagagaattatctgcaacttgattcttggcaggaaataaacattttgagttgaaatcaaaaaaaaaaaaaaaaaa

SEQ ID NO: 216 - DNA, 2358 bp, Homo sapiens
aaactcacacaacaactcttccccgctgagaggagacagccagtgcgactccaccctccagctcgacggcagccgccccggccgacagccccgagacgacagcccggcgcgtcccggtccccacctccgaccaccgccagcgctccaggccccgccgctccccgctcgccgccaccgcgccctccgctccgcccgcagtgccaaccatgaccgccgccagtatgggccccgtccgcgtcgccttcgtggtcctcctcgccctctgcagccggccggccgtcggccagaactgcagcgggccgtgccggtgcccggacgagccggcgccgcgctgcccggcgggcgtgagcctcgtgctggacggctgcggctgctgccgcgtctgcgccaagcagctgggcgagctgtgcaccgagcgcgacccctgcgacccgcacaagggcctcttctgtgacttcggctccccggccaaccgcaagatcggcgtgtgcaccgccaaagatggtgctccctgcatcttcggtggtacggtgtaccgcagcggagagtccttccagagcagctgcaagtaccagtgcacgtgcctggacggggcggtgggctgcatgcccctgtgcagcatggacgttcgtctgcccagccctgactgccccttcccgaggagggtcaagctgcccgggaaatgctgcgaggagtgggtgtgtgacgagcccaaggaccaaaccgtggttgggcctgccctcgcggcttaccgactggaagacacgtttggcccagacccaactatgattagagccaactgcctggtccagaccacagagtggagcgcctgttccaagacctgtgggatgggcatctccacccgggttaccaatgacaacgcctcctgcaggctagagaagcagagccgcctgtgcatggtcaggccttgcgaagctgacctggaagagaacattaagaagggcaaaaagtgcatccgtactcccaaaatctccaagcctatcaagtttgagctttctggctgcaccagcatgaagacataccgagctaaattctgtggagtatgtaccgacggccgatgctgcaccccccacagaaccaccaccctgccggtggagttcaagtgccctgacggcgaggtcatgaagaagaacatgatgttcatcaagacctgtgcctgccattacaactgtcccggagacaatgacatctttgaatcgctgtactacaggaagatgtacggagacatggcatgaagccagagagtgagagacattaactcattagactggaacttgaactgattcacatctcatttttccgtaaaaatgatttcagtagcacaagttatttaaatctgtttttctaactgggggaaaagattcccacccaattcaaaacattgtgccatgtcaaacaaatagtctatcaaccccagacactggtttgaagaatgttaagacttgacagtggaactacattagtacacagcaccagaatgtatattaaggtgtggctttaggagcagtgggagggtaccagcagaaaggttagtatcatcagatagcatcttatacgagtaatatgcctgctatttgaagtgtaattgagaaggaaaattttagcgtgctcactgacctgcctgtagccccagtgacagctaggatgtgcattctccagccatcaagagactgagtcaagttgttccttaagtcagaacagcagactcagctctgacattctgattcgaatgacactgttcaggaatcggaatcctgtcgattagactggacagcttgtggcaagtgaatttgcctgtaacaagccagattttttaaaatttatattgtaaatattgtgtgtgtgtgtgtgtgtgtatatatatatatatgtacagttatctaagttaatttaaagttgtttgtgcctttttatttttgtttttaatgctttgatatttcaatgttagcctcaatttctgaacaccataggtagaatgtaaagcttgtctgatcgttcaaagcatgaaatggatacttatatggaaattctgctcagatagaatgacagtccgtcaaaacagattgtttgcaaaggggaggcatcagtgtccttggcaggctgatttctaggtaggaaatgtggtagcctcacttttaatgaacaaatggcctttattaaaaactgagtgactctatatagctgatcagttttttcacctggaagcatttgtttctactttgatatgactgtttttcggacagtttatttgttgagagtgtgaccaaaagttacatgtttgcacctttctagttgaaaataaagtgtatattttttctataaaaaaaaaaaaaaaaa

SEQ ID NO: 217 - DNA, 2295 bp, Homo sapiens
agaccgcgagcgagagcgcccccgagcagcgcccgcgccctccgcgccttctccgccgggacctcgagcgaaagacgcccgcccgccgcccagccctcgcctccctgcccaccgggcccaccgcgccgccaccccgaccccgctgcgcacggcctgtccgctgcacaccagcttgttggcgtcttcgtcgccgcgctcgccccgggctactcctgcgcgccacaatgagctcccgcatcgccagggcgctcgccttagtcgtcacccttctccacttgaccaggctggcgctctccacctgccccgctgcctgccactgccccctggaggcgcccaagtgcgcgccgggagtcgggctggtccgggacggctgcggctgctgtaaggtctgcgccaagcagctcaacgaggactgcagcaaaacgcagccctgcgaccacaccaaggggctggaatgcaacttcggcgccagctccaccgctctgaaggggatctgcagagctcagtcagagggcagaccctgtgaatataactccagaatctaccaaaacggggaaagtttccagcccaactgtaaacatcagtgcacatgtattgatggcgccgtgggctgcattcctctgtgtccccaagaactatctctccccaacttgggctgtcccaaccctcggctggtcaaagttaccgggcagtgctgcgaggagtgggtctgtgacgaggatagtatcaaggaccccatggaggaccaggacggcctccttggcaaggagctgggattcgatgcctccgaggtggagttgacgagaaacaatgaattgattgcagttggaaaaggcagctcactgaagcggctccctgtttttggaatggagcctcgcatcctatacaaccctttacaaggccagaaatgtattgttcaaacaacttcatggtcccagtgctcaaagacctgtggaactggtatctccacacgagttaccaatgacaaccctgagtgccgccttgtgaaagaaacccggatttgtgaggtgcggccttgtggacagccagtgtacagcagcctgaaaaagggcaagaaatgcagcaagaccaagaaatcccccgaaccagtcaggtttacttacgctggatgtttgagtgtgaagaaataccggcccaagtactgcggttcctgcgtggacggccgatgctgcacgccccagctgaccaggactgtgaagatgcggttccgctgcgaagatggggagacattttccaagaacgtcatgatgatccagtcctgcaaatgcaactacaactgcccgcatgccaatgaagcagcgtttcccttctacaggctgttcaatgacattcacaaatttagggactaaatgctacctgggtttccagggcacacctagacaaacaagggagaagagtgtcagaatcagaatcatggagaaaatgggcgggggtggtgtgggtgatgggactcattgtagaaaggaagccttgctcattcttgaggagcattaaggtatttcgaaactgccaagggtgctggtgcggatggacactaatgcagccacgattggagaatactttgcttcatagtattggagcacatgttactgcttcattttggagcttgtggagttgatgactttctgttttctgtttgtaaattatttgctaagcatattttctctaggcttttttccttttggggttctacagtcgtaaaagagataataagattagttggacagtttaaagcttttattcgtcctttgacaaaagtaaatgggagggcattccatcccttcctgaagggggacactccatgagtgtctgtgagaggcagctatctgcactctaaactgcaaacagaaatcaggtgttttaagactgaatgttttatttatcaaaatgtagcttttggggagggaggggaaatgtaatactggaataatttgtaaatgattttaattttatattcagtgaaaagattttatttatggaattaaccatttaataaagaaatatttacctaatatctgagtgtatgccattcggtatttttagaggtgctccaaagtcattaggaacaacctagctcacgtactcaattattcaaacaggacttattgggatacagcagtgaattaagctattaaaataagataatgattgcttttataccttcagtagagaaaagtctttgcatataaagtaatgtttaaaaaacatgtattgaacacgacattgtatgaagcacaataaagattctgaagctaaatttgtgatttaagaaaa

SEQ ID NO: 218 - DNA, 1815 bp, Homo sapiens
gcagagctctgtgctccctgcagtcaggactctgggaccgcagggggctcccggaccctgactctgcagccgaaccggcacggtttcgtggggacccaggcttgcaaagtgacggtcattttctctttctttctccctcttgagtccttctgagatgatggctctgggcgcagcgggagctacccgggtctttgtcgcgatggtagcggcggctctcggcggccaccctctgctgggagtgagcgccaccttgaactcggttctcaattccaacgctatcaagaacctgcccccaccgctgggcggcgctgcggggcacccaggctctgcagtcagcgccgcgccgggaatcctgtacccgggcgggaataagtaccagaccattgacaactaccagccgtacccgtgcgcagaggacgaggagtgcggcactgatgagtactgcgctagtcccacccgcggaggggacgcaggcgtgcaaatctgtctcgcctgcaggaagcgccgaaaacgctgcatgcgtcacgctatgtgctgccccgggaattactgcaaaaatggaatatgtgtgtcttctgatcaaaatcatttccgaggagaaattgaggaaaccatcactgaaagctttggtaatgatcatagcaccttggatgggtattccagaagaaccaccttgtcttcaaaaatgtatcacaccaaaggacaagaaggttctgtttgtctccggtcatcagactgtgcctcaggattgtgttgtgctagacacttctggtccaagatctgtaaacctgtcctgaaagaaggtcaagtgtgtaccaagcataggagaaaaggctctcatggactagaaatattccagcgttgttactgtggagaaggtctgtcttgccggatacagaaagatcaccatcaagccagtaattcttctaggcttcacacttgtcagagacactaaaccagctatccaaatgcagtgaactccttttatataatagatgctatgaaaaccttttatgaccttcatcaactcaatcctaaggatatacaagttctgtggtttcagttaagcattccaataacaccttccaaaaacctggagtgtaagagctttgtttctttatggaactcccctgtgattgcagtaaattactgtattgtaaattctcagtgtggcacttacctgtaaatgcaatgaaacttttaattatttttctaaaggtgctgcactgcctatttttcctcttgttatgtaaatttttgtacacattgattgttatcttgactgacaaatattctatattgaactgaagtaaatcatttcagcttatagttcttaaaagcataaccctttaccccatttaattctagagtctagaacgcaaggatctcttggaatgacaaatgataggtacctaaaatgtaacatgaaaatactagcttattttctgaaatgtactatcttaatgcttaaattatatttccctttaggctgtgatagtttttgaaataaaatttaacatttaatatcatgaaatgttataagtagacatacattttgggattgtgatcttagaggtttgtgtgtgtgtacgtatgtgtgtgttctacaagaacggaagtgtgatatgtttaaagatgatcagagaaaagacagtgtctaaatataagacaatattgatcagctctagaataactttaaagaaagacgtgttctgcattgataaactcaaatgatcatggcagaatgagagtgaatcttacattactactttcaaaaatagtttccaataaattaataatacctaaaaaaaaaaa

SEQ ID NO: 219 - DNA, 2040 bp, Homo sapiens
tcgctgcgaaggacatttgggctgtgtgtgcgacgcgggtcggaggggcagtcgggggaaccgcgaagaagccgaggagcccggagccccgcgtgacgctcctctctcagtccaaaagcggcttttggttcggcgcagagagacccgggggtctagcttttcctcgaaaagcgccgccctgcccttggccccgagaacagacaaagagcaccgcagggccgatcacgctgggggcgctgaggccggccatggtcatggaagtgggcaccctggacgctggaggcctgcgggcgctgctgggggagcgagcggcgcaatgcctgctgctggactgccgctccttcttcgctttcaacgccggccacatcgccggctctgtcaacgtgcgcttcagcaccatcgtgcggcgccgggccaagggcgccatgggcctggagcacatcgtgcccaacgccgagctccgcggccgcctgctggccggcgcctaccacgccgtggtgttgctggacgagcgcagcgccgccctggacggcgccaagcgcgacggcaccctggccctggcggccggcgcgctctgccgcgaggcgcgcgccgcgcaagtcttcttcctcaaaggaggatacgaagcgttttcggcttcctgcccggagctgtgcagcaaacagtcgacccccatggggctcagccttcccctgagtactagcgtccctgacagcgcggaatctgggtgcagttcctgcagtaccccactctacgatcagggtggcccggtggaaatcctgccctttctgtacctgggcagtgcgtatcacgcttcccgcaaggacatgctggatgccttgggcatcactgccttgatcaacgtctcagccaattgtcccaaccattttgagggtcactaccagtacaagagcatccctgtggaggacaaccacaaggcagacatcagctcctggttcaacgaggccattgacttcatagactccatcaagaatgctggaggaagggtgtttgtccactgccaggcaggcatttcccggtcagccaccatctgccttgcttaccttatgaggactaatcgagtcaagctggacgaggcctttgagtttgtgaagcagaggcgaagcatcatctctcccaacttcagcttcatgggccagctgctgcagtttgagtcccaggtgctggctccgcactgttcggcagaggctgggagccccgccatggctgtgctcgaccgaggcacctccaccaccaccgtgttcaacttccccgtctccatccctgtccactccacgaacagtgcgctgagctaccttcagagccccattacgacctctcccagctgctgaaaggccacgggaggtgaggctcttcacatcccattgggactccatgctccttgagaggagaaatgcaataactctgggaggggctcgagagggctggtccttatttatttaacttcacccgagttcctctgggtttctaagcagttatggtgatgacttagcgtcaagacatttgctgaactcagcacattcgggaccaatatatagtgggtacatcaagtccatctgacaaaatggggcagaagagaaaggactcagtgtgtgatccggtttctttttgctcgcccctgttttttgtagaatctcttcatgcttgacatacctaccagtattattcccgacgacacatatacatatgagaatataccttatttatttttgtgtaggtgtctgccttcacaaatgtcattgtctactcctagaagaaccaaatacctcaatttttgtttttgagtactgtactatcctgtaaatatatcttaagcaggtttgttttcagcactgatggaaaataccagtgttgggtttttttttagttgccaacagttgtatgtttgctgattatttatgacctgaaataatatatttcttcttctaagaagacattttgttacataaggatgacttttttatacaatggaataaattatggcatttctattgaaatttcaaaaaaaaaaaaaaaaaa

SEQ ID NO: 220 - DNA, 1508 bp, Homo sapiens
ggcgcgggcggagggaggaggaggcggcgcgcgcggcgcccagcccgcagaagccggtggccgcgcaggaggacggagccctaaccgcaacccgctccgcgccgcgccgcgccgatttgatttgtatccactgtcaccagcactgctcacttaggactttctggatccggacccaggcagcgcacactggactcttgaggaagaaggagactctaattttggattccttggtggaggaaaataaaacactctggtcttgccgccaacgatgcaagtgtgactgctggcgtcttcatgagctccagaggtcacagcacgctaccaaggactctcatggcccctcggatgatttccgagggagacataggaggcattgctcaaatcacctcctctctattcctgggcagaggcagtgtggcctccaatcggcacctcctccaggctcgtggcatcacctgcattgttaatgctaccattgagatccctaatttcaactggccccaatttgagtatgttaaagtgcctctggctgacatgccgcatgcccccattggactgtactttgacaccgtggctgacaagatccacagtgtgagcaggaagcacggggccaccttggtgcactgtgctgcaggggtgagccgctcagccacgctgtgtatcgcgtacctgatgaaattccacaacgtgtgcctgctggaggcgtacaactgggtgaaagcccggcgacctgtcatcaggcccaacgtaggcttctggaggcaactgatagactacgagcgccagctctttgggaagtcgacagttaaaatggtacagacaccttatggcatagttcccgacgtctatgagaaggagtcccgacacctgatgccttactgggggatttagtgccactgaagcctgcgtcagcagcccgagcggggccggcatctgctccccgccgtctgctccctctccactctcttctcaaatggctgacttctggttctccctcaagtgttttttacactgggtgttcaaatttattttaagagatagggagggaggggacataaagggaatgcatacattgctagtcacatttttaaaattaacattttggaatagtgtttatggaaatctttagcttttaatcatttttaccaatttgaacagtttaataaactggttctgctctcttctgaatctcatgcctttggcaccttggtaggtgcaggaggagctcagtgcaaaaatcactttggggcctcattaaccctttagagacaagctttgccccaggctgcggaccagacagatgcttagggaaggttgataaccagcttcagtctctactggattagccctactctttcctttcccctccattatttagtgactctgtaagtaagttaaatacacccttattatttagctgttaagtaactataatgaaatctgctgcaaaatctctcttggaatccatgtgcccaggattatattagcattatttttaataaatctat

SEQ ID NO: 221 - DNA, 2545 bp, Homo sapiens
actcattcacataaaacgctgcgcggccggcggaatccccggcttctagggcggcgagcggccgggctggctatcgagcgagcggggcgggaacgcggagttgcgccgccgctcgggcgccgggctccgtcgcggccgcagccccgcgggtcgccctcccgtgcctcgcccgcggacaccctggccgtggacaccctggccgtgggcacccgcggggcgcgcggcgcggggccgctggccggcggcggcggcggcatgaaggtcacgtcgctcgacgggcgccagctgcgcaagatgctccgcaaggaggcggcggcgcgctgcgtggtgctcgactgccggccctatctggccttcgctgcctcgaacgtgcgcggctcgctcaacgtcaacctcaactcggtggtgctgcggcgggcccggggcggcgcggtgtcggcgcgctacgtgctgcccgacgaggcggcgcgcgcgcggctcctgcaggagggcggcggcggcgtcgcggccgtggtggtgctggaccagggcagccgccactggcagaagctgcgagaggagagcgccgcgcgtgtcgtcctcacctcgctactcgcttgcctacccgccggcccgcgggtctacttcctcaaagggggatatgagactttctactcggaatatcctgagtgttgcgtggatgtaaaacccatttcacaagagaagattgagagtgagagagccctcatcagccagtgtggaaaaccagtggtaaatgtcagctacaggccagcttatgaccagggtggcccagttgaaatccttcccttcctctaccttggaagtgcctaccatgcatccaagtgcgagttcctcgccaacctgcacatcacagccctgctgaatgtctcccgacggacctccgaggcctgcgcgacccacctacactacaaatggatccctgtggaagacagccacacggctgacattagctcccactttcaagaagcaatagacttcattgactgtgtcagggaaaagggaggcaaggtcctggtccactgtgaggctgggatctcccgttcacccaccatctgcatggcttaccttatgaagaccaagcagttccgcctgaaggaggccttcgattacatcaagcagaggaggagcatggtctcgcccaactttggcttcatgggccagctcctgcagtacgaatctgagatcctgccctccacgcccaacccccagcctccctcctgccaaggggaggcagcaggctcttcactgataggccatttgcagacactgagccctgacatgcagggtgcctactgcacattccctgcctcggtgctggcaccggtgcctacccactcaacagtctcagagctcagcagaagccctgtggcaacggccacatcctgctaaaactgggatggaggaatcggcccagccccaagagcaactgtgatttttgtttttaagactcatggacatttcatacctgtgcaatactgaagacctcattctgtcatgctgccccagtgagatagtgagtggtcaccaggcttgcaaatgaacttcagacggacctcagggtaggttctcgggactgaaggaaggccaagccattacgggagcacagcatgtgctgactactgtacttccagacccctgccctcttgggactgcccagtccttgcacctcagagttcgccttttcatttcaagcataaggcaataaatacctgcagcaacgtgggagaaagaagttgctggaccaggagaaaaggcagttatgaagccaattcattttgaaggaagcacaatttccaccttattttttgaactttggcagtttcaatgtctgtctctgttgcttcggggcataagctgatcaccgtctagttgggaaagtaaccctacagggtttgtagggacatgatcagcatcctgatttgaaccctgaaatgttgtgtagacaccctcttgggtccaatgaggtagttggttgaagtagcaagatgttggcttttctggattttttttgccatgggttcttcactgaccttggactttggcatgattcttagtcatacttgaacttgtctcattccacctcttctcagagcaactcttcctttgggaaaagagttcttcagatcatagaccaaaaaagtcataccttcgaggtggtagcagtagattccaggaggagaagggtacttgctaggtatcctgggtcagtggcggtgcaaactggtttcctcagctgcctgtccttctgtgtgcttatgtctcttgtgacaattgttttcctccctgcccctggaggttgtcttcaagctgtggacttctgggatttgcagattttgcaacgtggtactactttttttttctttttgtctgttagttatttctccaggggaaaaggcaataattttctaagacccgtgtgaatgtgaagaaaagcagtatgttactggttgttgttgttgttcttgttttttatagtgtaaaataaaaatagtaaaaggagaaaagcaaaaaaaaaaaaaaaaaa

SEQ ID NO: 222 - DNA, 4404 bp, Homo sapiens
aggattgggggtcccagcctgcgtcccgtcagtcccttcttggcccggagtgcgcggagctgggagtggcttcgccatggctgtgagaagggactccgtgtggaagtactgctggggtgttttgatggttttatgcagaactgcgatttccaaatcgatagttttagagcctatctattggaattcctcgaactccaaatttctacctggacaaggactggtactatacccacagataggagacaaattggatattatttgccccaaagtggactctaaaactgttggccagtatgaatattataaagtttatatggttgataaagaccaagcagacagatgcactattaagaaggaaaatacccctctcctcaactgtgccaaaccagaccaagatatcaaattcaccatcaagtttcaagaattcagccctaacctctggggtctagaatttcagaagaacaaagattattacattatatctacatcaaatgggtctttggagggcctggataaccaggagggaggggtgtgccagacaagagccatgaagatcctcatgaaagttggacaagatgcaagttctgctggatcaaccaggaataaagatccaacaagacgtccagaactagaagctggtacaaatggaagaagttcgacaacaagtccctttgtaaaaccaaatccaggttctagcacagacggcaacagcgccggacattcggggaacaacatcctcggttccgaagtggccttatttgcagggattgcttcaggatgcatcatcttcatcgtcatcatcatcacgctggtggtcctcttgctgaagtaccggaggagacacaggaagcactcgccgcagcacacgaccacgctgtcgctcagcacactggccacacccaagcgcagcggcaacaacaacggctcagagcccagtgacattatcatcccgctaaggactgcggacagcgtcttctgccctcactacgagaaggtcagcggggactacgggcacccggtgtacatcgtccaggagatgcccccgcagagcccggcgaacatttactacaaggtctgagagggaccctggtggtacctgtgctttcccagaggacacctaatgtcccgatgcctcccttgagggtttgagagcccgcgtgctggagaattgactgaagcacagcaccgggggagagggacactcctcctcggaagagcccgtcgcgctggacagcttacctagtcttgtagcattcggccttggtgaacacacacgctccctggaagctggaagactgtgcagaagacgcccattcggactgctgtgccgcgtcccacgtctcctcctcgaagccatgtgctgcggtcactcaggcctctgcagaagccaagggaagacagtggtttgtggacgagagggctgtgagcatcctggcaggtgccccaggatgccacgcctggaagggccggcttctgcctggggtgcatttcccccgcagtgcataccggacttgtcacacggacctcgggctagttaaggtgtgcaaagatctctagagtttagtccttactgtctcactcgttctgttacccagggctctgcagcacctcacctgagacctccactccacatctgcatcactcatggaacactcatgtctggagtcccctcctccagccgctggcaacaacagcttcagtccatgggtaatccgttcatagaaattgtgtttgctaacaaggtgccctttagccagatgctaggctgtctgcgaagaaggctaggagttcatagaagggagtggggctggggaaagggctggctgcaattgcagctcactgctgctgcctctgaaacagaaagttggaaaggaaaaaagaaaaaagcaattaggtagcacagcactttggttttgctgagatcgaagaggccagtaggagacacgacagcacacacagtggattccagtgcatggggaggcactcgctgttatcaaatagcgatgtgcaggaagaaaagcccctcttcattccggggaacaaagacgggtattgttgggaaaggaacaggcttggagggaagggagaaagtaggccgctgatgatatattcgggcaggactgttgtggtactggcaataagatacacagctccgagctgtaggagagtcggtctgctttggatgattttttaagcagactcagctgctatacttatcacattttattaaacacagggaaagcatttaggagaatagcagagagccaaatctgacctaaaagttgaaaagccaaaggtcaaacaggctgtaattccatcatcatcgttgttattaaagaatccttatctataaaaggtaggtcagatccccctccccccaggttcctccttcccctcccgattgagccttacgacactttggtttatgcggtgctgtccgggtgccagggctgcagggtcggtactgatggaggctgcagcgcccggtgctctgtgtcaaggtgaagcacatacggcagacctcttagagtccttaagacggaagtaaattatgatgtccagggggagaaggaagataggacgtatttataataggtatatagaacacaagggatataaaatgaaagatttttactaatatatattttaaggttgcacacagtacacaccagaagatgtgaaattcatttgtggcaattaagtggtcccaatgctcagcgcttaaaaaaacaaattggacagctacttctgggaaaaacaacatcattccaaaaagaacaataatgagagcaaatgcaaaaataaccaagtcctccgaaggcatctcacggaaccgtagactaggaagtacgagccccacagagcaggaagccgatgtgactgcatcatatatttaacaatgacaagatgttccggcgtttatttctgcgttgggttttcccttgccttatgggctgaagtgttctctagaatccagcaggtcacactgggggcttcaggtgacgatttagctgtggctccctcctcctgtcctcccccgcaccccctcccttctgggaaacaagaagagtaaacaggaaacctactttttatgtgctatgcaaaatagacatctttaacatagtcctgttactatggtaacactttgctttctgaattggaagggaaaaaaaatgtagcgacagcattttaaggttctcagacctccagtgagtacctgcaaaaatgagttgtcacagaaattatgatcctctatttcctgaacctggaaatgatgttggtccaaagtgcgtgtgtgtatgtgtgagtgggtgcgtggtatacatgtgtacatatatgtataatatatatctacaatatatattatatatatctatatcatatttctgtggagggttgccatggtaaccagccacagtacatatgtaattctttccatcaccccaacctctcctttctgtgcattcatgcaagagtttcttgtaagccatcagaagttacttttaggatgggggagaggggcgagaaggggaaaaatgggaaatagtctgattttaatgaaatcaaatgtatgtatcatcagttggctacgttttggttctatgctaaactgtgaaaaatcagatgaattgataaaagagttccctgcaaccaattgaaaagtgttctgtgcgtctgttttgtgtctggtgcagaatatgacaatctaccaactgtccctttgtttgaagttggtttagctttggaaagttactgtaaatgccttgcttgtatgatcgtccctggtcacccgactttggaatttgcaccatcatgtttcagtgaagatgctgtaaataggttcagattttactgtctatggatttggggtgttacagtagccttattcacctttttaataaaaatacacatgaaaacaagaaagaaatggcttttcttacccagattgtgtacatagagcaatgttggttttttataaagtctaagcaagatgttttgtataaaatctgaattttgcaatgtatttagctacagcttgtttaacggcagtgtcattcccctttgcactgtaatgaggaaaaaatggtataaaaggttgccaaattgctgcatatttgtgccgtaattatgtaccatgaatatttatttaaaatttcgttgtccaatttgtaagtaacacagtattatgcctgagttataaatatttttttctttctttgttttattttaatagcctgtcataggttttaaatctgctttagtttcacattgcagttagccccagaaaatgaaatccgtgaagtcacattccacatctgtttcaaactgaatttgttcttaaaaaaataaaatatttttttcctatggaaaaagtgccttcaaagtaaaaaaaaaaaaaaaaaa

SEQ ID NO: 223 - DNA, 6063 bp, Homo sapiens
taagttggcgcgtcacctagacgtcagcctcttacctctcggacgtcccgtcccaggagcaaaactctagtgactttgggcccgcccccgtgagagtggagggcggccgatgagggcggttctgaagggaacaagaccaatgagacgagcccggggcggggcgcggggccggagggtggggcgggtggcggcggtggcagtccgaggtctggctccgcgcagtatatgacagtacgtcagcagcgggatggccctagcagtggcggcggctgcagaagcccaagcagccgcggccgcagtggaggctagagccggagcggcggcggcggcggcaccccggggagtttaagatggcggcgggggggacagggggcctgcgggaggagcagcgctatgggctgtcgtgcggacggctggggcaggacaacatcaccgtactgcatgtgaagctcaccgagacggcgatccgggcgctcgagacttaccagagccacaagaatttaattccttttcgaccttcaatccagttccaaggactccacgggcttgtcaaaattcccaaaaatgatcccctcaatgaagttcataactttaacttttatttgtcaaatgtgggcaaagacaaccctcagggcagctttgactgcatccagcaaacattctccagctctggagcctcccagctcaattgcctgggatttatacaagataaaattacagtgtgtgcaacaaacgactcgtatcagatgacacgagaaagaatgacccaggcagaggaggaatcccgcaaccgaagcacaaaagttatcaaacccggtggaccatatgtagggaaaagagtgcaaattcggaaagcacctcaagctgtttcagatacagttcctgagaggaaaaggtcaacccccatgaaccctgcaaatacaattcgaaagacacatagcagcagcaccatctctcagaggccatacagggacagggtgattcacttactggccctgaaggcctacaagaaaccggagctacttgctagactccagaaagatggtgtcaatcaaaaagacaagaactccctgggagcaattctgcaacaggtagccaatctgaattctaaggacctctcatataccttaaaggattatgtttttaaagagcttcaaagagactggcctggatacagtgaaatagacagacggtcattggagtcagtgctctctagaaaactaaatccgtctcagaatgctgcaggcaccagccgttcagaatctcctgtatgttctagtagagacgctgtatcttctcctcagaaacggcttttggattcagagtttattgatcctttaatgaataaaaaagcccgaatatctcacctgacgaacagagtaccaccaacactaaatggtcatttgaatcccaccagtgaaaaatctgctgcaggcctcccgctgccccctgcggctgctgccatccctacccctccaccgctgccttcaacctatctgcccatctcacatcctcctcagattgtaaattctaactccaactcccctagcactccagaaggccgggggactcaagacctacctgttgacagttttagtcaaaacgatagtatctatgaggaccagcaagacaaatatacctctaggacttctctggaaaccttaccccctggttccgttctactaaagtgtccaaagcctatggaagaaaaccattcaatgtctcacaaaaagtccaaaaagaagtctaaaaaacataaggaaaaggaccaaataaaaaagcacgacattgagactattgaggaaaaggaggaagatcttaagagagaagaggaaattgccaagctaaataactccagtccaaattccagtggaggagttaaagaggattgcactgcctccatggaaccttcagcaattgaactcccagattatttgataaaatatatcgctatcgtctcctatgagcaacgccagaattataaggatgacttcaatgcagagtatgatgagtacagagctttgcatgccaggatggagactgtagctagaagatttatcaaactagatgcacaaagaaagcgcctttctccaggctcaaaagagtatcagaatgttcatgaagaagtcttacaagaatatcagaagataaagcagtctagtcccaattaccatgaagaaaaatacagatgtgaatatcttcataacaagctggctcacatcaaaaggctaataggtgaatttgaccaacagcaagcagagtcatggtcctagaactctgcttggaccagaagatgtgaataaacttaagcttatttatttaaaattccaaatgagttgctctagattctaaaaaggtgaaactttggctgttgaaagtttcagtattagtaaacttgagttactttttcttttccattttactttgcttccctgcatttcgaagctgctctttctggtcctccccaccaccccacccccaagacttgtgtttgttaatagaaataatttttttaggtattggggatccattgtctatatttcaaatcagttttttttcctcaaaaacttgtgtttgttattagaaatgattttttagatattggggatccagtgtccacacttaaaagttgtatgtgtttaaaaaacaacaacagtaatgtgcaaggtgaaatgcttttggataaacgtaagcctattttctgacgtttcttaatgcaaactctttgccttaaatggtagaatatttagaaatttgcacaaaattaaaaaaataaacattgtcttggagggttaaaaaatagaaaggtgtatgtgtatagattcacatacacatatgtatatacaggctgacttgatctagaacattaaatccgccctgcaagttaaccccccattgcaatggttgccttaaggtgtttgctagttgtgtacatagtgtggttaatcattagctacactgcttcccacttgattagagcaatgggaagcatactgtggcctaccagcatctggaagtgtgtgctcgatctgtatgtgtgcagaggtggtgtggatgtgagcgtgcatgaaggaaaaaaagctgctactcctagtaggccaaacgctcaggttaaacaactgacgagtgttactgtagggtgtttttttgtttttttgttttttttcttctatcaaattgctacttttgttgtggaagacaaaagcatttccatttcaacgagtttgtcagctttattaatgttgggcaaaaattgatatgtcatgaaaatgaaacagatctatagttttgggacaaaattataaaatgaaatgtgtaggtaacctatttatatactgctataaagtattttttgaagagagatatgcaaagaagctattacctacataagaggtatatttaaagattttttttttcatcctggtgccaggaatataaaaaagagtggatatatttaaccataacatactgtgattcatcaaacagcacaaactttcatttcatggagtttatctgttgacattgatttaaactgtcacttgttttatcatgtgggaacataagttatgtggtcaaaaatataaggattttgaattaatgttgattcaagttgtattgtcttattgtattgtcttttcaaagtgctgccagttgaaaagggaagcattatgtttacaaatctgttttgaaatgtttgccaaaattttggtagtgtctttaataaagatgtttgtctccagcatccagaaaaataaatgaataactttgttgtgtatcactgtaaaccagaaaaatgttggttatctagaaaacttgagagagcatgtagattaacttttctctttggagttctaaaacattaactggaaagattagataatatactaaatgtatacagaagtatacagactatacaaagactgaaacaagtcccttttgcactacaactctataacattaccgcagaaattttggttctatgtagcatggacctcctaaggaattctgtttcttttagcattgagatccctggtgctctttttttacctcagaattggtacaatcattattaaacgttaatttatttcaaactttttaattgaaaaaaggaaagggaaacttaattggggataaattcaggcatcatattattatgatagagtctcctgagtggttcgtctataggtaatgaactcattggtgttatttcttggacatcttggccttttaatcaaagactgtgtgctgctatttgctatgagcaaggtttctcaaaagcaaaaggtgcttggaccatttggatcacctgagttagaatctctaggtatagggcccaagtatctgcattttcacaggtttcttgtaggtgactttctgcaagctaaagtatgagaaccattggcttggatgtagttctaaacttttaggtctgtaaatcttgaaatcttgaactgaaggtcaactattggcttttttttttttttaatgtccatcatgtcagcaggtgcaaatcacttttcccctttgcatgatctgaggcacctcctcagttgtttcactgccaactcttgtttcagaacctgtttacaaacaagccttccagttggtgaatggttagccattggagctcctaccctgtacatcagcacatcttctggtttacaagttgggtaacaatgaaagctggagatgctaaatggaaatccagcattgcatacccttagacctgatcacataccagtaaaagccttaatttagatgttagttgtatgtgttggacagatccttgcaaaagtgtgtctgtctattagttgtaaatttgaaaattataaatctctgaatctgctactatccaagtttcatcccttttgaagatgaggcatgagcctattaaaatatttataatcatttttcgtcccctactgcaagacttttagattcttacaaatgattactacaggaatagtggccacttaatgtcagttactccggtggaagaatttatctagttttttttcttttcttttttggaaggatggtgtgaaaaatagcaagattagagaatgagttgtatagttttttctatcacatttcatctaaaatgatttgaaggacttttgaagatttttaccaacatccttaaatcaactccaggttggatgaacaactgatttaaaacaaactaagagaacattaactagatgtgggctttttaaaatatataggtattgcatttcctaccttgttatttattccactttgaatactttagagggcttaactttcaactctttaaggtagtaatggatagttttatacttgttctcacaaaattgttatggtcagtttatatcattgctccatgcattgattataaaaattcagtattaattttttctgatcttataagctttataggagttttcttttctcttataaagtgtttcaccttatgtaaaacaaatgcctgcttgcatattggaagatgttgaaattagttttagacaaaagtggtccatcaattcagacactctgcttggatgccttacccttttcattagtgcattctttgcttctgaaacttggcagaaactcgttagccagtccactgcctttctgacaatgtgtggagtcacgtatgcttggtatatgcctttactacttttaaagttctacagtttattacttgcccaagtgttactaaatccttttcttatgtgtactggatggagaaaaaattatagccagcactttgagaggaaagttttcagaaacaatattaactggcactactaactgaaggccacaggagatgctatcaatgttatttgtaatctgaagattgaacaaggctgtgaggctcatttcaaactattttgaggtgttaaaatatatatatgctgtttctcagctgttccactcaaaccgtgttaggactctcaaaggtaaaatgtcacaggggcttttcagttgttacagagctcagcagctgtggttgcccctgttctacaccaatttcagttcaataaaaatgttaactttgcaaaaaaaaaaaaaaaaaaa

SEQ ID NO: 224 - DNA, 5520 bp, Homo sapiens
agagtccagccgggggtgccgcacccactggggagtggggagggaggacacataggaaatgcctggggctggagtctctttggctctctgccagcaagaaacttaaacgtcctggcttgctcaacccgagtgtccctaaactgtccagacttttgcccgtccattgccactatctctccccactctgggtgtcctacccaaggcgctgtctatgcgtgcccagggcctgtcctgcggatacccagctcgccccttgcagccctttttagagcatctcgcgggctctggcatcaccaagcgcacagccccgggctgcgctcccctaaggtgggtccctcagatccggggctgtccattaaccaggctggcccaaagaggcgcagacactcgaacccgggaaaacttattttattctcggttcccggggttgcagctgccagcggctgagacagtgcgtccgctttgtctctctgcactccccgcagcccccctctcccgcttcctctcccgattaactcccccgacacgctcttctctagctcctctcctcctcccactccttctcctcctcttcctcctcctacaccacaggccgcgctaatgcgcttcctccctcccccggtgtcggtctctttgcatacgcgccccctcccctccccgccgcgccacttatagcggggcgcacggcggcggggcgcagactgctctggcagccggagaggaggcggtgcggcggtggcgctgcggagacccggtccagacgcctggcggccgccggcacacaaggcgctttctagctccctcccccgagcgcacagcccgcctccttccgcggcgcctgcagtggcaggcttgctctgccctaccgtgacgcgctccggagacgctctgcgggtcctggacaccgggtccgcggcgtggggacgacagacggaggcgaacgccatcggtagccggtccgcgagccatcgttcggggcgcagtcctctccccggctggccctcctttctccggggcattcgccaccgcttccctgggctgagacgaccggttcgtcgcctccttgcccgtgaccgtcgctagaactcagttgtgcgttgcggccagtcgccactgctgagtggaaacaaaatgtcagtcagtgtgcatgagaaccgcaagtccagggccagcagcggctccattaacatctatctgtttcacaagtcctcctacgctgacagcgtcctcactcacctgaatcttttacgccagcagcgtctcttcactgacgtccttctccatgccggaaataggaccttcccttgccaccgggcagtgctggctgcatgcagtcgctactttgaggccatgttcagtggtggcctgaaagagagccaggacagtgaggtcaactttgacaattccatccacccagaagtcttggagctgctgcttgactatgcgtactcctcccgggtcatcatcaatgaagaaaatgcagaatcgctcctggaagctggtgacatgctggagtttcaagacatccgggatgcatgtgcagagttcctggaaaagaacctgcatcccaccaactgcctgggcatgctgctgctgtctgatgcacaccagtgcaccaagctgtacgaactatcttggagaatgtgtctcagcaacttccaaaccatcaggaagaatgaagatttcctccagctgccccaggacatggtagtgcaactcttgtccagtgaagagctggagacagaggatgaaaggcttgtgtacgagtctgcaattaactggatcagctatgacctgaagaagcgctattgctacctcccagaactgttgcagacagtaaggctggcacttctgccagccatctatctcatggagaatgtggccatggaggaactcatcaccaagcagagaaagagtaaggaaattgtggaagaggccatcaggtgcaaactgaaaatcctgcagaatgacggtgtggtaaccagcctctgtgcccgacctcggaaaactggccatgccctcttccttctgggaggacagactttcatgtgtgacaagttgtatctggtagaccagaaggccaaagaaatcattcccaaggctgacattcccagcccaagaaaagagtttagtgcatgtgcgattggctgcaaagtgtacattactggggggcgggggtctgaaaatggggtctcaaaagatgtctgggtttatgataccctgcacgaggagtggtccaaggctgcccccatgctggtggccaggtttggccatggctctgctgaactgaagcactgcctgtatgtggttggggggcacacggccgcaactggctgcctcccggcctccccctcagtctctctaaagcaggtagaacattatgaccccacaatcaacaaatggaccatggtggccccactccgagaaggcgttagcaacgccgcagtagtgagtgccaaacttaagttatttgctttcggaggtaccagtgtcagtcatgacaagctccccaaagttcagtgttacgatcagtgtgaaaacaggtggactgtaccggccacctgtccccagccctggcgttacacagcagcagctgtgctggggaaccagatttttattatggggggtgatacagaattctctgcctgctctgcttataaattcaacagtgagacttaccagtggaccaaggtgggagatgtgacagcaaagcgcatgagctgccatgctgtggcctctggaaacaaactctacgtggttggaggatactttggcattcagcgatgcaagactttggactgctacgatccaacattagacgtgtggaacagcatcaccactgtcccgtactcgctgattcctactgcatttgtcagcacctggaaacatctgccttcttaaatgcagtacattctaaagagagtgagcatgagctcactccatcactcgatgagataatatgagatttctacttcggagaggccaagtctaatgaagagaaaaaaaggaaaagaagttgcaagactcgaataaaatctgctgcaccttgtaaatgctctaactggacatgaaggaaaggggcgagggaggggggtgggatttttggtgcaagtagcacatggtttaaatatgaatgaacaaacctgtgatctagtccttgtcttgtaattgtggattaatgtcaatgttaatcagcccctcaaagggagagaaaagctggaccttttcccttgctgtaccatattcagcatttgatttccatgggccccaccatttatgtgtagaatttgaaatggttgtcacctctctctgaggacagagcttgaagcctccacaccagctgctgctggagattcaaagcccaactgtgggtccgagagggaagctggctgggctggctgaagaatgaagaccactggactctccgttaatctctaaggggtctgctccccaggaacgtttctgaacaatggggactttgttggtagccatttggtagatgttcttttctatttataagtgactttaaactttcccttggctgttaagaagtttgttatagatttagctatttattgttcgatgcctgcatgctgaaacaatgcctacagctgtcttcacatgtatggacgtgtgtgaatggttgtacgttttgcacattttgtggctgttgagatgtgctttgctgcacaaacatgaaaatttttgagttacaatttggagcataactggagggtgggttggggaggggtggatttttaaaatgtcaagacagggaaggatgacaaaatggaaatttaaatgacatcctagaggtagagaaaccgtggagatcgcttttctcagactcaccaacttttaatgggatttcatggggtttggttgtgctgatagggtaaggggaggctgctttctgcccttctccccactcccatctgatttacttaattcagtctcagctgctgaaatttggaaaggaccaaattgctttacagtttttttctttgtgtagtatcttgaaatcctggaaaattctatggaatagttctgtatatagggcacaagtaaaggcattgtccaaagtttatttatttatttattaccctaagaatgctttgccataaccacatttaatgggaaaaacggcagtatcacagatgtaaattaactcaccagatttactgggcctgaactcattctcttcttgctatatgatttagcaagttctagaaggtctccaagacaataattacattggcacaatgtatacttcagtgctcacccgtaggcaaatctctttttaaaaaactctttggtgcacaagtaacacatttggccacaaaacaccaaagaattgtaggcagtggcccctattgagaagttttccggtagagttggaaatcagttgtgaatacattctttgctagttggagtgcttgtttactaagcatgtgccgtcgtaggtattagtgctagtctcagataggtgcttcccctgaggtgcaggggaagaccaaagtttgcaactcgaactgctttcgtccatgtttctcacattgctgtattttagaaaataggggttaagactgataacaaccttttacattgtgactgtgtttgcattgtctaatgacagataaatccttaacatttctctccaccttagtactttagactaattgtgtttgtccgtccatgccatgaatgagtgggctgtagttgggcctaaataaatgagctgttggaagaaaagaatcacagtactttccagcagtcagtccctggttcctagatgtgttctaagcaatgcaaatgtctaattgtcccccagtgggcatagtcagtgtcgtttatattgtagcagttacagctctgtagtttatgatgcaaatctgccaagagagatgtatgtgtcactgcatggcttctgaaagcaggatgaattttctgcagctgtttcaaagttggggtctgttcttgaatcctctattaattactgtgtgtgagccagagggagctgtggtaagggttgggcccccagcctgtagggaactttctggactcccactctttgaatcgatataggcatttggtctcactacttgaccattctcaccctgtgaaacgtcccacactttgaagcaaatacaattcacagcacagtacacacaaaaaccttggcataagacagagaaggttcttcttattttgtgggctggttgctgtagaaacacataacaaagggcagccctccacttctggtataattgtgtagccccttttctttgggcttgacacctgtcttgaataagagtgattagagctgcataatgtccctctcttggctattgaccatgtggttcacgtacaaaactctgtataagttgaaggaaaatgttcatgttcatatgtacttgtttgctatgactacattttgaggttttgtaaaactgttatttttttttttttcacaatgtgaaactgaaggtcaataaattattagagattttctcttcatta

SEQ ID NO: 225 - DNA, 3970 bp, Homo sapiens
ggttctcacccaacttccattaaggactcggggcaggaggggcagaagttgcgcgcaggccggcgggcgggagcggacaccgaggccggcgtgcaggcgtgcgggtgtgcgggagccgggctcggggggatcggaccgagagcgagaagcgcggcatggagctccaggcagcccgcgcctgcttcgccctgctgtggggctgtgcgctggccgcggccgcggcggcgcagggcaaggaagtggtactgctggactttgctgcagctggaggggagctcggctggctcacacacccgtatggcaaagggtgggacctgatgcagaacatcatgaatgacatgccgatctacatgtactccgtgtgcaacgtgatgtctggcgaccaggacaactggctccgcaccaactgggtgtaccgaggagaggctgagcgtatcttcattgagctcaagtttactgtacgtgactgcaacagcttccctggtggcgccagctcctgcaaggagactttcaacctctactatgccgagtcggacctggactacggcaccaacttccagaagcgcctgttcaccaagattgacaccattgcgcccgatgagatcaccgtcagcagcgacttcgaggcacgccacgtgaagctgaacgtggaggagcgctccgtggggccgctcacccgcaaaggcttctacctggccttccaggatatcggtgcctgtgtggcgctgctctccgtccgtgtctactacaagaagtgccccgagctgctgcagggcctggcccacttccctgagaccatcgccggctctgatgcaccttccctggccactgtggccggcacctgtgtggaccatgccgtggtgccaccggggggtgaagagccccgtatgcactgtgcagtggatggcgagtggctggtgcccattgggcagtgcctgtgccaggcaggctacgagaaggtggaggatgcctgccaggcctgctcgcctggattttttaagtttgaggcatctgagagcccctgcttggagtgccctgagcacacgctgccatcccctgagggtgccacctcctgcgagtgtgaggaaggcttcttccgggcacctcaggacccagcgtcgatgccttgcacacgacccccctccgccccacactacctcacagccgtgggcatgggtgccaaggtggagctgcgctggacgccccctcaggacagcgggggccgcgaggacattgtctacagcgtcacctgcgaacagtgctggcccgagtctggggaatgcgggccgtgtgaggccagtgtgcgctactcggagcctcctcacggactgacccgcaccagtgtgacagtgagcgacctggagccccacatgaactacaccttcaccgtggaggcccgcaatggcgtctcaggcctggtaaccagccgcagcttccgtactgccagtgtcagcatcaaccagacagagccccccaaggtgaggctggagggccgcagcaccacctcgcttagcgtctcctggagcatccccccgccgcagcagagccgagtgtggaagtacgaggtcacttaccgcaagaagggagactccaacagctacaatgtgcgccgcaccgagggtttctccgtgaccctggacgacctggccccagacaccacctacctggtccaggtgcaggcactgacgcaggagggccagggggccggcagcaaggtgcacgaattccagacgctgtccccggagggatctggcaacttggcggtgattggcggcgtggctgtcggtgtggtcctgcttctggtgctggcaggagttggcttctttatccaccgcaggaggaagaaccagcgtgcccgccagtccccggaggacgtttacttctccaagtcagaacaactgaagcccctgaagacatacgtggacccccacacatatgaggaccccaaccaggctgtgttgaagttcactaccgagatccatccatcctgtgtcactcggcagaaggtgatcggagcaggagagtttggggaggtgtacaagggcatgctgaagacatcctcggggaagaaggaggtgccggtggccatcaagacgctgaaagccggctacacagagaagcagcgagtggacttcctcggcgaggccggcatcatgggccagttcagccaccacaacatcatccgcctagagggcgtcatctccaaatacaagcccatgatgatcatcactgagtacatggagaatggggccctggacaagttccttcgggagaaggatggcgagttcagcgtgctgcagctggtgggcatgctgcggggcatcgcagctggcatgaagtacctggccaacatgaactatgtgcaccgtgacctggctgcccgcaacatcctcgtcaacagcaacctggtctgcaaggtgtctgactttggcctgtcccgcgtgctggaggacgaccccgaggccacctacaccaccagtggcggcaagatccccatccgctggaccgccccggaggccatttcctaccggaagttcacctctgccagcgacgtgtggagctttggcattgtcatgtgggaggtgatgacctatggcgagcggccctactgggagttgtccaaccacgaggtgatgaaagccatcaatgatggcttccggctccccacacccatggactgcccctccgccatctaccagctcatgatgcagtgctggcagcaggagcgtgcccgccgccccaagttcgctgacatcgtcagcatcctggacaagctcattcgtgcccctgactccctcaagaccctggctgactttgacccccgcgtgtctatccggctccccagcacgagcggctcggagggggtgcccttccgcacggtgtccgagtggctggagtccatcaagatgcagcagtatacggagcacttcatggcggccggctacactgccatcgagaaggtggtgcagatgaccaacgacgacatcaagaggattggggtgcggctgcccggccaccagaagcgcatcgcctacagcctgctgggactcaaggaccaggtgaacactgtggggatccccatctgagcctcgacagggcctggagccccatcggccaagaatacttgaagaaacagagtggcctccctgctgtgccatgctgggccactggggactttatttatttctagttctttcctccccctgcaacttccgctgaggggtctcggatgacaccctggcctgaactgaggagatgaccagggatgctgggctgggccctctttccctgcgagacgcacacagctgagcacttagcaggcaccgccacgtcccagcatccctggagcaggagccccgccacagccttcggacagacatatgggatattcccaagccgaccttccctccgccttctcccacatgaggccatctcaggagatggagggcttggcccagcgccaagtaaacagggtacctcaagccccatttcctcacactaagagggcagactgtgaacttgactgggtgagacccaaagcggtccctgtccctctagtgccttctttagaccctcgggccccatcctcatccctgactggccaaacccttgctttcctgggcctttgcaagatgcttggttgtgttgaggtttttaaatatatattttgtactttgtggagagaatgtgtgtgtgtggcagggggccccgccagggctggggacagagggtgtcaaacattcgtgagctggggactcagggaccggtgctgcaggagtgtcctgcccatgccccagtcggccccatctctcatccttttggataagtttctattctgtcagtgttaaagattttgttttgttggacatttttttcgaatcttaatttattattttttttatatttattgttagaaaatgacttatttctgctctggaataaagttgcagatgattcaaaccgaaaaaaa

SEQ ID NO: 226 - DNA, 3144 bp, Homo sapiens
agaggcggcggcggcagccgcggcgacggcggtccggtgcgaggcagagtgctagcgggagcgcgagccagcaagaggcgcctgcgcgatgtccgggcccctgagcccgcggcgctgagccagccgggacggacatgcgcgggagggcgccgcggggcagccgccgctcctccgggggaatgaaagctactggttgattttaaagtgcctgggcctcacaggtttggagatgtcccagaataaggcacaatgtcaatagcaggagttgctgctcaggagatcagagtcccattaaaaactggatttctacataatggccgagccatggggaatatgaggaagacctactggagcagtcgcagtgagtttaaaaacaactttttaaatattgacccgataaccatggcctacagtctgaactcttctgctcaggagcgcctaataccacttgggcatgcttccaaatctgctccgatgaatggccactgctttgcagaaaatggtccatctcaaaagtccagcttgccccctcttcttattcccccaagtgaaaacttgggaccacatgaagaggatcaagttgtatgtggttttaagaaactcacagtgaatggggtttgtgcttccacccctccactgacacccataaaaaactccccttcccttttcccctgtgcccctctttgtgaacggggttctaggcctcttccaccgttgccaatctctgaagccctctctctggatgacacagactgtgaggtggaattcctaactagctcagatacagacttccttttagaagactctacactttctgatttcaaatatgatgttcctggcaggcgaagcttccgtgggtgtggacaaatcaactatgcatattttgataccccagctgtttctgcagcagatctcagctatgtgtctgaccaaaatggaggtgtcccagatccaaatcctcctccacctcagacccaccgaagattaagaaggtctcattcgggaccagctggctcctttaacaagccagccataaggatatccaactgttgtatacacagagcttctcctaactccgatgaagacaaacctgaggttccccccagagttcccatacctcctagaccagtaaagccagattatagaagatggtcagcagaagttacttcgagcacctatagtgatgaagacaggcctcccaaagtaccgccaagagaacctttgtcaccgagtaactcgcgcacaccgagtcccaaaagccttccgtcttacctcaatggggtcatgcccccgacacagagctttgcccctgatcccaagtatgtcagcagcaaagcactgcaaagacagaacagcgaaggatctgccagtaaggttccttgcattctgcccattattgaaaatgggaagaaggttagttcaacacattattacctactacctgaacgaccaccatacctggacaaatatgaaaaattttttagggaagcagaagaaacaaatggaggcgcccaaatccagccattacctgctgactgcggtatatcttcagccacagaaaagccagactcaaaaacaaaaatggatctgggtggccacgtgaagcgtaaacatttatcctatgtggtttctccttagaccttggggtcatggttcagcagaggttacataggagcaaatggttctcaattttccagtttgattgaagtgcagagaaaaatcccttagattgcaaaataaaatagttgaactctctgtcttcatgtggaaggtttagagcagttgtgagatgctgttatgctgagaaaccctgactttgttagtgttggaaaaaagtcttacaagtctataatttaaagatgtgatggtggggaggggaggatggggaagctttttatatatgcatacattacatacctatatataaacttgtggtataaccatagaccatagctgcaggttaaccaattagttactatcgtagagtaatatatattcagaataataaactcaagctggagaaatgagtcctgatagactgaaaattgagcaaatggaagaagatacagtattgtttagatcagaatcattaaaaaatatttttgtttagtaagtttgaagatttctggcttttaggccttttctattttgttccatttatttttgcaggcaatcttttccatggagggcagggtatccattctttaccatgggtgtacctgcttaggttaaaaatcataccaaggcctcatacttccaggtttcatgttgcgtcttgttgagggagggagagcaggttacttggcaaccatattgtcacctgtacctgtcacacatcttgaaaaataaaacgataatagaactagtgactaattttcccttacagttcctgcttggtcccacccactgaagtagctcatcgtagtgcgggccgtattagaggcagtggggtacgttagactcagatggaaaagtattctaggtgccagtgttaggatgtcagttttacaaaataatgaagcaattagctatgtgattgagagttattgtttggggatgtgtgttgtggttttgctttttttttttagactgtattaataaacatacaacacaagctggccttgtgttgctggttcctattcagtatttcctggggattgtttgctttttaagtaaaacacttctgacccatagctcagtatgtctgaattccagaggtcacatcagcatctttctgctttgaaaactctcacagctgtggctgcttcacttagatgcagtgagacacatagttggtgttccgattttcacatccttccatgtatttatcttgaagagataagcacagaagagaaggtgctcactaacagaggtacattactgcaatgttctcttaacagttaaacaagctgtttacagtttaaactgctgaatattatttgagctatttaaagcttattatattttagtatgaactaaatgaaggttaaaacatgcttaagaaaaatgcactgatttctgcattatgtgtacagtattggacaaaggattttattcattttgttgcattattttgaatattgtcttttcattttaataaagttataatacttatttatgataccattaaaaaaaaaaaaaaaa

SEQ ID NO: 227 - DNA, 5143 bp, Homo sapiens
agttggaaagagaccacagactttgagggaagctcactcaggatctgctctccggcaaagtagtaagtgaggtgctgagagcagaatgagctactttgtggattctgctgggagcagccccgtcccttactcagcgcctcgtcctgcagtggtgaggcaaggacctagcaacacttatgaagatcctcgaatgaactgtggtttccagtccaattatcaccagcaaagaccttgctaccccttttgggatgagatggcaactcaggaagttcctactggtcttgaacactgtgtctcagatatggaatgtgcagatgtcccactattaactccaagcagcaaagaaatgatgtctcaagcattaaaagctactttcagtggtttcactaaagaacagcaacgactggggatcccaaaagacccccggcagtggacagaaacccatgttcgggactgggtgatgtgggctgtgaatgaattcagcctgaaaggtgtagacttccagaagttctgtatgaatggagcagccctctgcgccctgggtaaagactgctttctcgagctggccccagactttgttggggacatcttatgggaacatctagagatcctgcagaaagaggatgtgaaaccatatcaagttaatggagtcaacccagcctatccagaatcccgctatacctcggattacttcattagctatggtattgagcatgcccagtgtgttccaccatcggagttctcagagcccagcttcatcacagagtcctatcagacgctccatcccatcagctcggaagagctcctctccctcaagtatgagaatgactacccctcggtcattctccgagaccctctccagacagacaccttgcagaatgactactttgctatcaaacaagaagtcgtcaccccagacaacatgtgcatggggaggaccagtcgtggtaaactcgggggccaggactcttttgaaagcatagagagctacgatagttgtgatcgcctcacccagtcctggagcagccagtcatctttcaacagcctgcagcgtgttccctcctatgacagcttcgactcagaggactatccggctgccctgcccaaccacaagcccaagggcaccttcaaggactatgtgcgggaccgtgctgacctcaataaggacaagcctgtcattcctgctgctgccctagctggctacacaggcagtggaccaatccagctatggcagtttcttctggaattactcactgataaatcctgtcagtcttttatcagctggacaggagatggctgggaattcaaactttctgacccagatgaggtggccaggagatggggaaagaggaaaaacaaacctaagatgaattatgagaaactgagccgtggcctacgctactattacgacaaaaacatcatccacaagacagcggggaaacgctacgtgtaccgctttgtgtgtgacctgcagagcctgctggggtacacccctgaggagctgcacgccatgctggacgtcaagccagatgccgacgagtgatggcactgaaggggctggggaaaccctgctgagaccttccaaggacagccgtgttggttggactctgaattttgaattgttattctattttttattttccagaactcattttttaccttcaggggtgggagctaagtcagttgcagctgtaatcaattgtgcgcagttgggaaaggaaagccaggacttgtggggtgggtgggaccagaaattcttgagcaaattttcaggagagggagaagggccttctcagaagcttgaaggctctggcttaacagagaaagagactaatgtgtccaatcatttttaaaaatcatccatgaaaaagtgtcttgagttgtggacccattagcaagtgacattgtcacatcagaactcatgaaactgatgtaaggcaattaatttgcttctgtttttaggtctgggagggcaaaaaagaggtgggtgggatgaaacatgttttggggggggatgcactgaaaatctgagaactatttacctatcactctagttttgaagcaaagatggacttcagtggggaggggccaaaaccgttgttgtgttaaaatttattttattaaattttgtgccagtattttttttcttaaaaatcgtcttaagctctaaggtggtctcagtattgcaatatcatgtaagtttgtttttatttgccggctgaggattctgtcacaatgaaagaaaactgtttatatagaccccattggaaaagcaaaacgctctcactgagatcagggatcccaaattcatgggacttatataagaaggacaattaatgctgatttgggtacaggggaattatgtgtgtgaatgtcatctacaattaaaaaaaattagcacatccctttacttacttgttatcagtggattctcggggtttggacttaatgttgagctaagaagcattaagtctttgaactgaatgtattttgcatccctggttttggacgacagtaaacgtaggagcactgttgaagtcctggaagggagatcgaaggaggaagattgacttggttctttcttagtcctatatctgtagcatagatgacttggaataaaagctgtatgcatgggcattacccctcaggtcctaagaaataagtcctgaatgcatgtcgttccaaactaacactctgtaatttttcttttatgtcttattttccaagagtcctccattttttgcaccccctcaccgccaactctgttattcagtagagagaagtgtacggctttctgattggtgagtgaaaaagtaacttgagacacgacctaagttgaagagtttagacttgctgagttttagaagtgatggaaattaagagagcatttcaataaaatgtgacttggctgtctttggaagagaagtgcaaggctttcctttgaagaatttaaattagtccggtaggatgtcaggtgagactgtgtatgcaaaatgaatggcacaggtgatgccagggcctcttgcttgggtctgatgtcttggcacagggtaagtgaaggttaattccagaagagaggaatgacttgaaggcaaaggaaactaaggaaggaggttcagtgaggaaaataaggttgtccatgagatttgaatagatttttagttcccccaaggtttaaatacaaacatagtcaagcaaggtagtcatctttctgctggttgtgagggggaatctgaaaatggagttttagaggaaaagtcaacatctaactagtgaggaaaagtgcctaatacaattagaatctccctcactctatagttgcccagttgaaaggataaggaggaggggtggcttttatggacttccatgagagaaggaaagaaatatttcaggtaagcttctcagggctggccctttttgggatttggatgagaaattggaagtactaactactttctagcatatctttaagaaaattgattgttatttactcccagatcctcttgcagacccagaattatcaggaacatagctctgtgattcatgagtgtccccatactgatgaattggagcatccatatggaaagcaaaggcagaattatcccagctgtattattttgatcttttggatgcaggtgccttaatgaagctctcaaaatattttaggagctgctcagggagtgttgggtggaactgtttggactacattgttttctcttagattatgtgatttttgttgggcactggcaaaaggtgtgtgtgtgaatgtgtgcatgtgtgtgaatgttgtgtgtgtgtgtgtgtgtgtgtgtgtgtgtgtgtgtgtgtgtgtttgcagacatgcaaaactgcagctgaaataataccttagatttctaggtaagtctttccacatttcaataatgggtaagagtagaaccagggccgggtatcaattattgcttgctgtttgcaaccaggcataaaatcactttctcaaatcatccaccgttcctattaaatttatgccggaaactctccttctgtgagtataactcctgcagttcctatagcagataagatataagaaagtgcctcctagtgctcctccgcccgcttgtttgctaaaattccctttctctctaagtccaccattttcaagatttgtagatagtgtattagttaagacagctttgtcgatctggccagatgttttttctcctttgtccaaaggccagagaccatcccaggaagagtggtgggtggtttatacactggaaatgttgcgtttatgctttttaaaaacacacgttaacttcagaggaaggatgggcaaatctggtctagctgggtgaaacccttattttcccagagatgccttaacctttgttggttttggctttagggttcagagtcacttttgttcccttctccattctggagagggacttcccctacatagagccctgatttttgtggctgtggggattggaggtagcattcaaagatcagatgtgcttttcctcactttggagatgaacactctgggttttacagcattaacctgcctaaccttcatggtgagaaatacaccatctctcttctagtcatgctgtgcatgccgcttactctgttggggtctatataaatttgttgaactcttacctacattccaaagaagtttcaaggaaccataaatatatgtatacatatacatatataaaatatatatattaaaataaaattatcaggaatactgcctcagttattgaacttttttttttaagaatactttttttttaagctgagaagtatagggatgaaaaagatgttatattgtgtttgactattttccaacttgtattttcatataatttatattttttaaaagctgaaaatttagaagcaagatgaaaaaaaggaaaagcaggtgctttttaaaaatcagaactgaggtagcttagagatgtagcgatgtaagtgtcgatgtttttttaaaaaaaaatgcaaaaaaattcttatggcggagttttttgtttgtttattttagtagctgatgctggcacatcattttgctggagagttttttatatactgtagcctgatttcatattgtattttaaactgtgtgaaattaaaaacaaagaatttcattcataatgct

SEQ ID NO: 228 - DNA, 2192 bp, Homo sapiens
gcttcctccaggtctcccggcaacggctgcggcctcgcccacgttatggcgcccgaggagaacgcggggaccgaactcttgctgcagggttttgagcgccgcttcctggcggtgcgcacactgcgctccttcccctggcagagcttagaggcaaagttaagagactcatcagattctgagctgctgcgggatattttgcagaagactgtgaggcatcctgtgtgtgtgaagcacccgccgtcagtcaagtatgcctggtgctttctctcagaactcatcaaaaagtcctcaggaggctcagtcacactctccaagagcacagccatcatctcccacggtaccacaggcctggtcacatgggatgccgccctctaccttgcagaatgggccatcgagaacccggcagccttcattaacagacgtgctgtattgcccagaagccatcgtgtcgctggtcggggtcctgcagaggctggctgcctgccgggagcacaagcgggctcctgaggtctacgtggcctttaccgtccgcaacccagagacgtgccagctgttcaccaccgagctaggccgggatgggatcagatgggaagcggaagctcatcatgaccagaaactgtttccctatggagagcacttggagatggcaatgctgaacctcacactgtaggactcacacatgactccaaagggattgtgagaatcaagtcactctcgtgggaagaatttttatatgggaaagtggataaaactttcattggactggaatgtttggagattattaaactccaaatcaggaatcaaaactgccctctaataagacattagctgtctaggcgtgtgggtgccccctttctgccagcagttctggttctcaagaaaatcatcataaatcagacatgaaaattctagctccaaaaatagcattttctttctgcaaataaaaacgtgtgtatcaaggatgacgttcccccaacgtggacacactcggttcctcagaaagccaagcccgctgcagctgccacatccctggacacactcggttcctcacaaagccaagcccgctgcagctgccacatccctggacacactcggttcctcacaaagccaagcccgctgcagctgccacatccctggacacactcggttcctcacaaagccaagcccgctgcagctgccacatcccagggcttatggtgcagcaggcgcttttttcaagacaggaatgaaagtgttaggaacacggcagaaaggtgacacctggagaccaaatgcaggatgaggagtactgcagaggtcacagggaagtcacagaacagtaatacgctagcaggggcatggggcatgaagaacagaagacaggaagcatttcagagactccaaagaagaaatcagggccaaccacagcttcccgggtcattcaccaggtgacaccactgccgtcatttcagcttctggccactgggaggcgctgctcgaaaggctttgccctgagactccaagaagctgcgggaaggacagcaggggccctggggttttagcctctggcccaggagttatgtgtccataaccaaagggagcacagtctgcacccagctctcatcccatcagagctgctgagactcttgcaggttcttccagaactggcttagcttgcctgcaggatcagaaaagtttgagaaaagcatctgcaaaatgctaaagagcagagcttaactcattgcctgtccccaccccatcccaggtcaccacttggatgaccccaggtccccgacccaacaacaacccctcccaagtccctaactccctcacttggacttgagacccttcacaacccccctcacttggacttgagacccttcacaacccagcagcgctccacttccaacttgacatcatgctttctggaaacttccccgtatgtcccactttcccacacttggtgccctggagcaccttccggcctctacatgctgtacgttcccctgtgagcaccctcctctcggcctctggccaacacagtcccacccatctgtgggtaacaagggggtgtgggtgttcttttcagccttgctaaactgtctgaatcaaggatcacaaactacagcctgcaggccaaatccagcccacagcctgtgtttgtaaataaagctttgttggaacaaagccacaaaaaaaaaaaaaaaaaaaaa

SEQ ID NO: 229 - DNA, 3351 bp, Homo sapiens
gggtggagcgcggggagccaggcgaggggccgcgacgacgggactccattagccgctccggccacaggcagcgcttcgccagccgaggaaccggacgcggacaccgccgccccgcgagcctccagcccctcgcctgttgccgcgcgagtcccgggcccggagcgctaggagcgcgcggaaggagccatggctctggacgggataaggatgccagatggctgctacgcggacgggacgtgggaactgagtgtccatgtgacggacctgaaccgcgatgtcaccctgagagtgaccggcgaggtgcacattggaggcgtgatgcttaagctggtggagaaactcgatgtaaaaaaagattggtctgaccatgctctctggtgggaaaagaagagaacttggcttctgaagacacattggaccttagataagtatggtattcaggcagatgctaagcttcagttcacccctcagcacaaactgctccgcctgcagcttcccaacatgaagtatgtgaaggtgaaagtgaatttctctgatagagtcttcaaagctgtttctgacatctgtaagacttttaatatcagacaccccgaagaactttctctcttaaagaaacccagagatccaacaaagaaaaaaaagaagaagctagatgaccagtctgaagatgaggcacttgaattagaggggcctcttatcactcctggatcaggaagtatatattcaagcccaggactgtatagtaaaacaatgacccccacttatgatgctcatgatggaagccccttgtcaccaacttctgcttggtttggtgacagtgctttgtcagaaggcaatcctggtatacttgctgtcagtcaaccaatcacgtcaccagaaatcttggcaaaaatgttcaagcctcaagctcttcttgataaagcaaaaatcaaccaaggatggcttgattcctcaagatctctcatggaacaagatgtgaaggaaaatgaggccttgctgctccgattcaagtattacagcttttttgatttgaatccaaagtatgatgcaatcagaatcaatcagctttacgagcaggccaaatgggccattctcctggaagagattgaatgcacagaagaagaaatgatgatgtttgcagccctgcagtatcatatcaataagctgtcaatcatgacatcagagaatcatttgaacaacagtgacaaagaagttgatgaagttgatgctgccctttcagacctggagattactctggaagggggtaaaacgtcaacaattttgggtgacattacttccattcctgaacttgctgactacattaaagttttcaagccaaaaaagctgactctgaaaggttacaaacaatattggtgcaccttcaaagacacatccatttcttgttataagagcaaagaagaatccagtggcacaccagctcatcagatgaacctcaggggatgtgaagttaccccagatgtaaacatttcaggccaaaaatttaacattaaactcctgattccagttgcagaaggcatgaatgaaatctggcttcgttgtgacaatgaaaaacagtatgcacactggatggcagcctgcagattagcctccaaaggcaagaccatggcggacagttcttacaacttagaagttcagaatattctttcctttctgaagatgcagcatttaaacccagatcctcagttaataccagagcagatcacgactgatataactcctgaatgtttggtgtctccccgctatctaaaaaagtataagaacaagcagataacagcgagaatcttggaggcccatcagaatgtagctcagatgagtctaattgaagccaagatgagatttattcaagcttggcagtcactacctgaatttggcatcactcacttcattgcaaggttccaagggggcaaaaaagaagaacttattggaattgcatacaacagactgattcggatggatgccagcactggagatgcaattaaaacatggcgtttcagcaacatgaaacagtggaatgtcaactgggaaatcaaaatggtcaccgtagagtttgcagatgaagtacgattgtccttcatttgtactgaagtagattgcaaagtggttcatgaattcattggtggctacatatttctctcaacacgtgcaaaagaccaaaacgagagtttagatgaagagatgttctacaaacttaccagtggttgggtgtgaataggaatactgtttaatgaaactccacggccataacaatatttaactttaaaagctgtttgttatatgctgcttaataaagtaagcttgaaatttatcattttatcatgaaaacttctttgccttaccagaccagttaatatgtgcactaaacaagcacgactattaatctatcatgttatgatataataaacttgaatttgtcacacattccttagggccatgaattgaaaactgaaatagtgggcaaatcaggaacaaaccatcactgatttactgatttaagctagccaaactgtaagaaacaagccatctattttaaagctatccagggcttaacctatatgaactctatttatcatgtctaatgcatgtgatttaatgtatgtttaatttgatatcatgttttaaaatatcctacttctggtagccatttaattcctccccctacccccaaataaatcaggcatgcaggaggcctgatatttagtaatgtcattgtgtttgaccttgaaggaaaatgctattagtccgtcgtgcttgatttgtttttgtccttgaataagcatgttatgtatattgtctcgtgtttttatttttacaccatattgtattacacttttagtattcaccagcataatcactgtctgcctaaaatatgcaactctttgcattacaatatgaagtaaagttctatgaagtatgcattttgtgtaactaatgtaaaaacacaaattttataaaattgtacagttttttaaaaactactcacaactagcagatggcttaaatgtagcaatctctgcgttaattaaatgcctttaagagatataattaacgtgcagttttaatatctactaaattaagaatgacttcattatgatcatgatttgccacaatgtccttaactctaatgcctggactggccatgttctagtctgttgcgctgttacaatctgtattggtgctagtcagaaaattcctagctcacatagcccaaaagggtgcgagggagaggtggattaccagtattgttcaataatccatggttcaaagactgtataaatgcattttattttaaataaaagcaaaacttttatttaataaaaaaaaaaaaaaaaa

SEQ ID NO: 230 - DNA, 5399 bp, Homo sapiens
ggggaagcttcgcaggcgtgcacggagcagtgagatcactggcgttataaatatcccggtgccagcgcggagatccgctcgggtggcctctctcttcccctctccccttctcttccccgaggctatgtccacccggtgcggcgaggcgggcagagccagaggcacgcagccgcacaggggctacagagcccagaatcagccctacaagatgcacttaggacccccgcggctggaagaatgagcttgtccttcctcctcctcctcttcttcagccacctgatcctcagcgcctgggctcacggggagaagcgtctcgcccccaaagggcaacccggacccgctgccactgataggaaccctagaggctccagcagcagacagagcagcagtagcgctatgtcttcctcttctgcctcctcctcccccgcagcttctctgggcagccaaggaagtggcttggagcagagcagtttccagtggagcccctcggggcgccggaccggcagcctctactgcagagtgggcatcggtttccatctgcagatctacccggatggcaaagtcaatggatcccacgaagccaatatgttaagtgttttggaaatatttgctgtgtctcaggggattgtaggaatacgaggagttttcagcaacaaatttttagcgatgtcaaaaaaaggaaaactccatgcaagtgccaagttcacagatgactgcaagttcagggagcgttttcaagaaaatagctataatacctatgcctcagcaatacatagaactgaaaaaacagggcgggagtggtatgtggccctgaataaaagaggaaaagccaaacgagggtgcagcccccgggttaaaccccagcatatctctacccattttctgccaagattcaagcagtcggagcagccagaactttctttcacggttactgttcctgaaaagaaaaagccacctagccctatcaagccaaagattcccctttctgcacctcggaaaaataccaactcagtgaaatacagactcaagtttcgctttggataatattcctcttggccttgtgagaaaccattctttcccctcaggagtttctataggtgtcttcagagttctgaagaaaaattactggacacagcttcagctatacttacactgtattgaagtcacgtcatttgtttcaatgtgactgaaacaaaatgttttttgataggaaggaaactggaattctttgtactaatacagggagcacactccttcagttcagcaagacataaagccttttgctttatgcttgagggatatttagaactttgtattttcggaaagttaaataacagggactacgtatttttctgacttttacagattaacctgaaagaacatacatgatacatttttatttttggtttccaaagaatattttgatgcagataaaatattttgttaacttttgtttttttttgtttgttttcttaaaagtacctctgcattgagcatattttcttacttttattattttaattaatatgacataagcaatcattttatgctgtttatgaattataaatgtgtttatagctcatttgtaatatggaaatcttttacatttttcctattcactgcacttttttattgtttttatttctagccatacctcagataatatgtttagttttacattttaaaatgtttaaattctctttcacagcaccaaaggctcagcttggatttgtgtgtatgtgtatgtcaattcatgacattatgtggaatcctaaacctttggtggctgggatatgatgggttagaagcaaggagaaaatataaggactttttgatggaattaaatgtgggaggtaaggaaaaggatttagaggtaaaagtacactaagtttgcaacatttattgagatctaagtctgtcttgccttcatttctctttttatctcccccttgccctcattcttgaacagctggaggaatacattttattctgtccatgaagcatacactatgaaattcaagtgcttaaaaatacttctatgactctctgctatcccactgtatagatccacagggagcaaacacttagaaatgatagagaactgaaggagatcaatggtttaacagttatccatgccaagtcccattgtcagaaatattcttattactcagtcaaacactctttgagcttcccttcctaaaggtaaccaatccagtgaatagatgtgcccttttataaggaaacttctgatgtttattaaaaaaactggccttttgatagaggtaacttaatttgggaatttgttgtgttgaaatggcatttaatttcaacctaaatactgactgctggacataaatcacagaaaatttaacttaagaaaatttacaaaatttattctcaggtaatcattttaataaagttctgcaaaatacacgtttatcttacattcagaaatgtggcaaaaaaggcatagctaaaggctaaacatatggctttagtagtaacaaaagggttcatagaaacttcatggtttgcatttaaacatgtttaaagtgtacttataaactatttttttcttaaagcaaactatgatttattttggtgcacaaatacaaagtggaaacttaccaaaattgaactagctaccatataagcagattgctttaatttgatgggaaaatagtacacacatatatataacaaataatatattaaaaaacccatccatcaactaaaacattatatgtatacatcagtatagtgttttattataaagccaattatctgattaagcattctttccactgaatgcataatgtttaaatagcataaaatgaaatgctacaaaaattgaactaatttatactttaaagtatttctgggttaaatgaaacaatgaaattttttagtatgttcaactctcatccaaatggcatatgaccctgtttacacagcctaaagctaaaaatattactctagtttattctaatctattgttaagtattgtgcactgtataccaagttcttagggcacatgaaaaattttagctgccaaacaggaactagtaaacatatgttcctaataagtgaagggaaagataataatgatggtcaacaataagccacgtcaatgcataagttgtataggctaaatgttgcttgtaggctacattaaactcaaatgtaatagtttatcttatactcctggtttgatttgattagcatattaacgtgaaagtaggatagctactaaatatatattatgcaagtcaggaatcattaatttcaaaatttaaagccatgctaaaattaaaaagaaaatattaaattacacaattacacttgtctttactggccatacaaaatgattttttttttttttttgagacagagtcttgctctgtcaccaggctggagtgcagtggcatgatctcggctcactgcaacctccaactccctggtttaagggattctcctgcctcagcctcccaagtagctgggattacagactcatgccaccacgccagctaatttttgtatttttagtagagacggggtttcaccatgttggtcaggatggtctcaatcctggcctcttgatagtcctgacctcatgatctgcccacctcggcctccccaaagtgctgggattacaggtacaatgatgtataattaatgcttagtgaagcataaagttacctacatcaattaattaaatgaacttatgtacagaaaacatgtataaatataagtctatactaatgcttacaactttctaagagggttcttgcttatgtagctttttattattttaagtaactagaaccaccaaatatcaaataaaattatttggttatggttatgttcatctaaacacaacaataacttttatattaatatttaggagtctattttgtctataggtgacaaacatctccagactaacatgtcagttttatcaattatattatgtttaattatttaagatttctttatgtggaacatctatagagataaatagaaattttcaataagatgtagtaacactgtgatttatctttcaagagtctctcttcacttccttctaaagagactaatttgagagtacaggtgcatattaattttcttggttctttcagctgaattatattggtccagaagttcaaaatcatgtgacaataataagggatactgacagaagttatttccaagtttgtgtatatattataaaaattacatatataaaactaaggcttttatttctgttatttttaagcttttatttcttgtagctaaaaataaaacatcataaatctggtaggtaaatttcttattaaatcaatcttgaaatagaaaatgtaataactttcttaccattaacattttttacccttccatagaagggagggaataaatcatgacttatcccattttcaataacaaaacgaaactatggcactaaccaaaaacttgcattctggcataatttttacagttgcagagaattgtttctgggctcattaaaaaaagtagtattgcagacattgctgcaatgggaagcagacaataacttcttaaaggaattctacacctcctttaagatttacttaattgctacatctaaattctgataatttaaaatccattttaggtgataaaattttttaaaagttttgaaggaaacctctggataaatggacaaggcctaatttttttttgtagtcaatccaactgtactggccaatttttgaaataagattatatgattaggtattagcagagacaaagagttacctcctccatcttactctgccctatttgaaagtctcaggggagaaaagggaacaagatgctgatccaacctgagtggagtcaggtgaggcatctttacatctaagaatttttttttaaattttattattattatacttcaagttctagggtacatgtccacaatgcacatgtctgtcacacatgcacacatgtgccatgctggtgtgctgcacccaccaacctgtcatccagcattaggtatatctcctaatgctatccctcccctctccacccaccccacagcaggccccggtatgtgatgttccccttcgtgtgtccatgtgttcttattgttcaattcccacctatgagtgagaatatgtggtgtttggtttttggtccttgcaatagtttgctgagaatgatggtttccagcttcatccatgtccctacaaagaacatgaactcatcattttttatggctgcatagtattccatggtgtatatgtgccacattttcttaatccagtctatcattgttggacatttgggttggttccaagtctttgctattgtgaatagtgctgcaataaacatatgtgtgcatgtgtctttaaaaaaaaaaa

SEQ ID NO: 231 - DNA, 3776 bp, Homo sapiens
cattcataagactcagagctacggccacggcagggacacgcggaaccaagacttggaaacttgattgttgtggttcttcttgggggttatgaaatttcattaatctttttttttccggggagaaagtttttggaaagattcttccagatatttcttcattttcttttggaggaccgacttactttttttggtcttctttattactcccctccccccgtgggacccgccggacgcgtggaggagaccgtagctgaagctgattctgtacagcgggacagcgctttctgcccctgggggagcaacccctccctcgcccctgggtcctacggagcctgcactttcaagaggtacagcggcatcctgtgggggcctgggcaccgcaggaagactgcacagaaactttgccattgttggaacgggacgttgctccttccccgagcttccccggacagcgtactttgaggactcgctcagctcaccggggactcccacggctcaccccggacttgcaccttacttccccaacccggccatagccttggcttcccggcgacctcagcgtggtcacaggggcccccctgtgcccagggaaatgtttcaggctttccccggagactacgactccggctcccggtgcagctcctcaccctctgccgagtctcaatatctgtcttcggtggactccttcggcagtccacccaccgccgccgcctcccaggagtgcgccggtctcggggaaatgcccggttccttcgtgcccacggtcaccgcgatcacaaccagccaggacctccagtggcttgtgcaacccaccctcatctcttccatggcccagtcccaggggcagccactggcctcccagcccccggtcgtcgacccctacgacatgccgggaaccagctactccacaccaggcatgagtggctacagcagtggcggagcgagtggcagtggtgggccttccaccagcggaactaccagtgggcctgggcctgcccgcccagcccgagcccggcctaggagaccccgagaggagacgctcaccccagaggaagaggagaagcgaagggtgcgccgggaacgaaataaactagcagcagctaaatgcaggaaccggcggagggagctgaccgaccgactccaggcggagacagatcagttggaggaagaaaaagcagagctggagtcggagatcgccgagctccaaaaggagaaggaacgtctggagtttgtgctggtggcccacaaaccgggctgcaagatcccctacgaagaggggcccgggccgggcccgctggcggaggtgagagatttgccgggctcagcaccggctaaggaagatggcttcagctggctgctgccgcccccgccaccaccgcccctgcccttccagaccagccaagacgcaccccccaacctgacggcttctctctttacacacagtgaagttcaagtcctcggcgaccccttccccgttgttaacccttcgtacacttcttcgtttgtcctcacctgcccggaggtctccgcgttcgccggcgcccaacgcaccagcggcagtgaccagccttccgatcccctgaactcgccctccctcctcgctctgtgaactctttagacacacaaaacaaacaaacacatgggggagagagacttggaagaggaggaggaggaggagaaggaggagagagaggggaagagacaaagtgggtgtgtggcctccctggctcctccgtctgaccctctgcggccactgcgccactgccatcggacaggaggattccttgtgttttgtcctgcctcttgtttctgtgccccggcgaggccggagagctggtgactttggggacagggggtgggaaggggatggacacccccagctgactgttggctctctgacgtcaacccaagctctggggatgggtggggaggggggcgggtgacgcccaccttcgggcagtcctgtgtgaggattaagggacgggggtgggaggtaggctgtggggtgggctggagtcctctccagagaggctcaacaaggaaaaatgccactccctacccaatgtctcccacacccaccctttttttggggtgcctaggttggtttcccctgcactcccgaccttagcttattgatcccacatttccatggtgtgagatcctctttactctgggcagaagtgagccccccccttaaagggaattcgatgcccccctagaataatctcatccccccacccgacttcttttgaaatgtgaacgtccttccttgactgtctagccactccctcccagaaaaactggctctgattggaatttctggcctcctaaggctccccaccccgaaatcagcccccagccttgtttctgatgacagtgttatcccaagaccctgccccctgccagccgaccctcctggccttcctcgttgggccgctctgatttcaggcagcaggggctgctgtgatgccgtcctgctggagtgatttatactgtgaaatgagttggccagattgtggggtgcagctgggtggggcagcacacctctggggggataatgtccccactcccgaaagcctttcctcggtctcccttccgtccatcccccttcttcctcccctcaacagtgagttagactcaagggggtgacagaaccgagaagggggtgacagtcctccatccacgtggcctctctctctctcctcaggaccctcagccctggcctttttctttaaggtcccccgaccaatccccagcctaggacgccaacttctcccaccccttggcccctcacatcctctccaggaagggagtgaggggctgtgacatttttccggagaagatttcagagctgaggctttggtacccccaaacccccaatatttttggactggcagactcaaggggctggaatctcatgattccatgcccgagtccgcccatccctgaccatggttttggctctcccaccccgccgttccctgcgcttcatctcatgaggatttctttatgaggcaaatttatattttttaatatcggggggtggaccacgccgccctccatccgtgctgcatgaaaaacattccacgtgccccttgtcgcgcgtctcccatcctgatcccagacccattccttagctatttatccctttcctggtttccgaaaggcaattatatctattatgtataagtaaatatattatatatggatgtgtgtgtgtgcgtgcgcgtgagtgtgtgagcgcttctgcagcctcggcctaggtcacgttggccctcaaagcgagccgttgaattggaaactgcttctagaaactctggctcagcctgtctcgggctgacccttttctgatcgtctcggcccctctgattgttcccgatggtctctctccctctgtcttttctcctccgcctgtgtccatctgaccgttttcacttgtctcctttctgactgtccctgccaatgctccagctgtcgtctgactctgggttcgttggggacatgagattttattttttgtgagtgagactgagggatcgtagatttttacaatctgtatctttgacaattctgggtgcgagtgtgagagtgtgagcagggcttgctcctgccaaccacaattcaatgaatccccgacccccctaccccatgctgtacttgtggttctctttttgtattttgcatctgaccccggggggctgggacagattggcaatgggccgtcccctctccccttggttctgcactgttgccaataaaaagctcttaaaaacgca

SEQ ID NO: 232 - DNA, 6468 bp, Homo sapiens
acgggccaaggcggcgcgtctcgggggtggagcctggaggtgaccgcgccgctgcaacgcccccaccccccgcggtcgcagtggttcagcccgagaacttttcattcataaaaagaaaagactccgcacggcgcgggtgagtcagaacccagcagccgtgtaccccgcagagccgccagccccgggcatgttccgagacttcggggaacccggcccgagctccgggaacggcggcgggtacggcggccccgcgcagcccccggccgcagcgcaggcagcccagcagaagttccacctggtgccaagcatcaacaccatgagtggcagtcaggagctgcagtggatggtacagcctcatttcctggggcccagcagttaccccaggcctctgacctaccctcagtacagccccccacaaccccggccaggagtcatccgggccctggggccgcctccaggggtacgtcgaaggccttgtgaacagatcagcccggaggaagaggagcgccgccgagtaaggcgcgagcggaacaagctggctgcggccaagtgcaggaaccggaggaaggaactgaccgacttcctgcaggcggagactgacaaactggaagatgagaaatctgggctgcagcgagagattgaggagctgcagaagcagaaggagcgcctagagctggtgctggaagcccaccgacccatctgcaaaatcccggaaggagccaaggagggggacacaggcagtaccagtggcaccagcagcccaccagccccctgccgccctgtaccttgtatctccctttccccagggcctgtgcttgaacctgaggcactgcacacccccacactcatgaccacaccctccctaactcctttcacccccagcctggtcttcacctaccccagcactcctgagccttgtgcctcagctcatcgcaagagtagcagcagcagcggagacccatcctctgacccccttggctctccaaccctcctcgctttgtgaggcgcctgagccctactccctgcagatgccaccctagccaatgtctcctccccttcccccaccggtccagctggcctggacagtatcccacatccaactccagcaacttcttctccatccctctaatgagactgaccatattgtgcttcacagtagagccagcttggggccaccaaagctgcccactgtttctcttgagctggcctctctagcacaatttgcactaaatcagagacaaaatatttcccatttgtgccagaggaatcctggcagcccagagactttgtagatccttagaggtcctctggagccctaaccccttccagatcactgccacactctccatcaccctcttcctgtgatccacccaaccctatctcctgacagaaggtgccactttacccacctagaacactaactcaccagccccactgccagcagcagcaggtgattggaccaggccattctgccgccccctcctgaaccgcacagctcaggaggcgcccttggcttctgtgatgagctgatctgcggatctcagctttgagaagccttcagctccagggaatccaagcctccacagcgagggcagctgctatttattttcctaaagagagtatttttatacaaacctaccaaaatggaataaaaggcttgaagctgtggcctgagtgcctcactggacccagaggccaatgggagagtatttggagccctaggtcccagccttagctctacagactcactgcaaaaaaaggcgcgttccttcctcttcctctctcctctccggccccgccttcccttccctccgcccacctccctgaagcggagccgccgtcgccaccagcgccgtcatgtcggcccccgccgggtcctctcacccggccgccagcgcccggatcccgcccaagttcggcggagcggccgtctcaggagccgcagcgcccgcgggcccgggtgcgggcccggcgccgcaccagcagaacggtccagcccagaatcaaatgcaggttccatctggatatggattgcatcatcaaaactatattgctccctcaggacattactctcaaggacctgggaaaatgacctcattgccattggatacccagtgtggtgattactactctgctctctatacagtaccaacacaaaatgtgactcctaacacagtgaaccagcaaccaggagcacagcagttgtacagcaggggtcctcctgcccctcatattgtgggatccactctaggatctttccaaggtgctgcatcgtcagcatcccatttgcatacgagtgcctcccaaccatactcctcttttgtgaatcactacaatagtccagccatgtactctgccagctcttctgttgcgtctcagggatttccctctacttgtggtcattatgctatgtcaactgtttctaatgccgcgtatcctagtgtttcatatccctctctgcctgctggtgatacatatgggcaaatgtttacctcacagaatgctccgactgttaggccagttaaagataattcattctctggtcaaaatacagctatcagccatccatcgccacttccacctctaccatcacaacagcaccaccagcagcaaagtctttcaggatacagtactctaacgtggtcatctccaggccttccatcgactcaagacaatctcatccgaaaccacacaggatccctggctgtagcgaacaacaacccaaccattactgttgcagattctttatcctgtcctgttatgcaaaatgttcagcctcccaagtccagcccagtggtatccactgttttatcaggatcctcaggatcctcatcaacaagaacacctcccactgcaaatcacccagttgagcctgtgacctcagttacacagccatcagagctattacaacaaaaaggcgtgcagtatggtgaatatgttaataaccaagctagctccgcaccaactcccttgtcatcaacttccgatgatgaggaagaggaggaggaggatgaggaagcaggtgttgacagctcttctaccacaagcagtgcttctccaatgcccaacagttatgatgccctggaaggaggcagttacccagatatgctttcttcatcagcaagcagtcctgctcctgatcccgcccctgaacctgatcctgcttctgctccagctccagcttcagctccagctcctgtcgtccctcagccttcaaaaatggctaagccttttggctatggctatccaacacttcagcctggttatcagaatgctacagcaccacttatttctggagtacagcccagtaacccggtatattctggattccagcagtatcctcaacagtatcctggtgtgaaccagctatcctccagtataggaggattgagtcttcagagttctccacaaccagaaagcctgagacctgtaaaccttactcaggagaggaatattttacctatgactcctgtttgggctcctgtacctaacttgaatgcagacctcaaaaaattaaactgtagcccagattcatttcggtgtactttgacaaatattccacagacacaggctttactgaataaagctaagcttcctttaggattgttgttacatcccttcagagacctaacgcaattaccagtgataacatcaaataccattgtgaggtgccgatcctgtcgaacgtatattaacccctttgtatccttcattgatcaacgtagatggaaatgcaatttgtgctatagagtaaacgatgttcctgaagaatttatgtataacccccttacccgatcttatggagagcctcataaacgaccagaagttcagaattcaactgtggagttcattgcttcttcagattacatgctgcgtcctcctcaacctgcagtttacttgtttgttttagatgtgtctcataatgcagtggaagctggatatttgacaattttgtgccagtcactcctagaaaatctagacaagcttcctggagattcacgaacaagaataggattcatgacctttgatagcactattcatttctacaatttacaagaaggattatcacagcctcaaatgttgattgtgtctgatatagatgatgtttttctacctacaccggatagtttacttgtgaatctatatgaaagtaaagagcttataaaagacttactgaatgcattaccaaacatgttcaccaatacaagagaaacacacagtgcccttggtcctgcacttcaggctgcctttaaattaatgtctccaacaggtggccgtgtgtctgtatttcagacacagttaccttccttgggtgcaggacttctgcaatccagagaagatcctaatcagagatcaagtacaaaggtggtacaacatcttggccctgcaactgatttttataagaaacttgcattagattgctcgggacagcaaactgcagtggatttgttccttttaagttcacagtattctgatcttgcttctctagcttgcatgtccaagtattctgcagggtgcatctattattatccatcattccactatactcacaatccttcacaagcagaaaagttacaaaaagacctaaaacggtatctcacaagaaaaattgggtttgaagctgttatgagaataaggtgtactaaaggtctttcaatgcacacttttcacggtaacttctttgtccgttctactgatttgttatcccttgccaacatcaatcctgatgctggatttgcggtgcagttgtcaattgaagaaagtttaacagatacttccttagtatgttttcaaacagccctattatatacatcaagcaaaggtgagcggagaattagagtacatacactttgtttgccagtggtaagttcactagcagatgtatatgcgggagtggatgtacaagctgccatctgccttctggcaaacatggctgtggatcggtccgtttcatcaagtctgtcagatgcaagagatgccttagtgaatgctgtagtggactcattgtctgcatatggctcaactgtctcaaatttacagcactctgcattgatggcgcccagctccctcaagttgtttcctctctatgttttggcccttctcaaacagaaagcatttagaacgggtacaagcacacggctggatgatcgtgtatatgccatgtgtcagataaagtctcagccacttgttcatctaatgaaaatgattcatcccaacttatacaggatagacagattgacagatgagggtgcagtacatgttaatgacaggattgtaccacagccacctcttcaaaaattgtctgcagagaagctgacaagagaaggtgctttccttatggactgtggctctgttttttacatttgggttgggaaaggctgtgacaataacttcatagaggatgtgcttggatatactaattttgcatcaataccacagaaaatgacacatcttccagagctagatacactttcatcagaaagagccagatccttcataacttggcttagagacagcagaccattaagtccaatccttcacatagtaaaagatgagagtcctgccaaagcagaattttttcagcatttgattgaagaccggacagaggctgcattttcttactatgaatttttgcttcatgttcagcagcagatttgtaagtgaagtagaataaaattgaataagaaaaagatctataacctaggtaaagcataatctgtcagagaagcgcgtgagaaatttgaaatgaaggcatttgttaatacaagatgcaacgcacagcactctgtctgaggctttggtaaaaagtaaaggggaagaaagaacttgacagatctttttcaactcaaattaatggtaacgatgatgctgtttcaccaagtatattttgaattggtttctacacatttccagtagtatggcagtacagtgctctgttcattgcaagctggcaaatttatgtagctatgtggaatgatatgtcataatgtaaaattagataaattcttttttcttataattaatataacatttctggacttgaactctggcaagagatgccaaaaggcattggtaccgtgttatttgtttatatgaattactttttaacaaggaatgtttcttattcattaaatgaattcaacattttctctgtaaaaacaatagagtttcagtacatgaactatagaaaaaaatctatatataatgtacataaatgttacatttgtaaagaaaatgtaaaaatgtaactatagcatatgaattgcttaaactgtgctgcattgttggatgacaactctttttgtcacagttagagaatgaggttgactaatgcatattatgaattgagtccacaaaggaacacaaaactctttgtaattctgttaaatcttttatgtagatttatttatgatcagcctactaattaaaactatttcgcttgacagtaaaaaaaaaaaaaaaaaaaaa

SEQ ID NO: 233 - DNA, 2098 bp, Homo sapiens
ttgggaagggtttccagaaggtgggaaatgtcacctgattcacactgaacttttgaaagctccccacccccaaggagccgcgcacaccctcgctcgcggccgccctcccacagccccacacactgggagaccgcccaccgcaaaccgcggagacccccgtctagatttaaagcgcggctgcgcccggcttctgacgtccattgaatcgcgcgggcggccggcggcgagcgcggggctgcgccgggatcgctgcgccctccgccgctggcctctgcgacgcgcgccgctcgcccgagccacccgccgccgcgccggctccccgcgccgctgcgctcctcgccccgcgcctgcccccaggatggtccgcgcgaggcaccagccgggtgggctttgcctcctgctgctgctgctctgccagttcatggaggaccgcagtgcccaggctgggaactgctggctccgtcaagcgaagaacggccgctgccaggtcctgtacaagaccgaactgagcaaggaggagtgctgcagcaccggccggctgagcacctcgtggaccgaggaggacgtgaatgacaacacactcttcaagtggatgattttcaacgggggcgcccccaactgcatcccctgtaaagaaacgtgtgagaacgtggactgtggacctgggaaaaaatgccgaatgaacaagaagaacaaaccccgctgcgtctgcgccccggattgttccaacatcacctggaagggtccagtctgcgggctggatgggaaaacctaccgcaatgaatgtgcactcctaaaggcaagatgtaaagagcagccagaactggaagtccagtaccaaggcagatgtaaaaagacttgtcgggatgttttctgtccaggcagctccacatgtgtggtggaccagaccaataatgcctactgtgtgacctgtaatcggatttgcccagagcctgcttcctctgagcaatatctctgtgggaatgatggagtcacctactccagtgcctgccacctgagaaaggctacctgcctgctgggcagatctattggattagcctatgagggaaagtgtatcaaagcaaagtcctgtgaagatatccagtgcactggtgggaaaaaatgtttatgggatttcaaggttgggagaggccggtgttccctctgtgatgagctgtgccctgacagtaagtcggatgagcctgtctgtgccagtgacaatgccacttatgccagcgagtgtgccatgaaggaagctgcctgctcctcaggtgtgctactggaagtaaagcactccggatcttgcaactgaatctgcccgtaaaacctgagccattgattcttcagaactttctgcagtttttgacttcatagattatgctttaaaaaaatttttttaacttattgcataacagcagatgccaaaaacaaaaaaagcatctcactgcaagtcacataaaaatgcaacgctgtaatatggctgtatcagagggctttgaaaacatacactgagctgcttctgcgctgttgttgtccgtatttaaacaacagctcccctgtattcccccatctagccatttcggaagacaccgaggaagaggaggaagatgaagaccaggactacagctttcctatatcttctattctagagtggtaaactctctataagtgttcagtgttgacatagcctttgtgcaaaaaaaaaaaaaaaaaaaaagaaaaagaaaaaaagaaaaatatattgtccatactgtaaataagtgtatgcttatttatttggggggaaaactatacattaaaggacctttgtcctaaagctctctcccaggccaccttgttactcattggacacggagaggcattcattgtgaggtctactggatgaggcccatagttgagacttgtagacatttatttatactgtgtcatgttttataatttatacataaaatgtctggttgactgtataccttgtttttgaagaaatttattcgtgaaaggaagagcagttgttatttattgtgaggtctcttgcttgtaaagtaaaagctttttttccttgtaaaccatttaagtccattccttactattcactcac

SEQ ID NO: 234 - DNA, 1393 bp, Homo sapiens
tcagatcgccgaagcgtcggactaccgttggtttccgcaacttcctggattatcctcgccaaggactttgcaatatatttttccgccttttctggaaggatttcgctgcttcccgaaggtcttggacgagcgctctagctctgtgggaaggttttgggctctctggctcggattttgcaatttctccctggggactgccgtggagccgcatccactgtggattataattgcaacatgacgctggaagagctcgtggcgtgcgacaacgcggcgcagaagatgcagacggtgaccgccgcggtggaggagcttttggtggccgctcagcgccaggatcgcctcacagtgggggtgtacgagtcggccaagttgatgaatgtggacccagacagcgtggtcctctgcctcttggccattgacgaggaggaggaggatgacatcgccctgcaaatccacttcacgctcatccagtccttctgctgtgacaacgacatcaacatcgtgcgggtgtcgggcatgcagcgcctggcgcagctcctgggagagccggccgagacccagggcaccaccgaggcccgagacctgcattgtctcctggtcacgaaccctcacacggacgcctggaagagccacggcttggtggaggtggccagctactgcgaagaaagccggggcaacaaccagtgggtcccctacatctctcttcaggaacgctgaggcccttcccagcagcagaatctgttgagttgctgccacaaacaaaaaatacaataaatatttgaaccccctcccccccagcacaacccccccaaaacaacccaacccacgaggaccatcgggggcagagtcgttggagactgaagaggaagaggaggaggagaaggggagtgagcggccgcccccagggcggagatccaggagctggcggccgccgatccgatggagaaggggggacccaggccagcaggagacaggacccccgaagctgaggccttgggatggagcagaagccggagtggcggggcacgctgccgccttccccatcacggagggtccagactgtccactcgggggtggagtgagactgactgcaagccccaccctccttgagactggagctggcgtctgcatacgagagacttggttgaacttggttggtccttgtctgcaccctcgacaagaccacactttgggacttgggagctggggctgaagttgctctgtacccatgaactcccagtttgcgaattatagagacaatctattttgttacttgcacttgttattcgaaccactgagagcgagatgggaagcatagatatctatatttttatttctactatgagggccttgtaataaatttctaaagcctctgaaaaaaaaaaaaaaaaaa

SEQ ID NO: 235 - DNA, 5478 bp, Homo sapiens
agtttggtctggagcagctgaaaccggtttgagcgtggctgcttcctgccgctcgacgccgcggcaggccgcctggggggagcgctggcgaggcacggacggcgggcgcccggtacctctgcccgcggtcctcgctctcgggcggggcggcggcgacgcggacctgcggactagcgaacccggagcacgacatcataaaataaatccatcagaatgacaccttctcaggttgcctttgaaataagaggaactcttttaccaggagaagtttttgcgatatgtggaagctgtgatgctttgggaaactggaatcctcaaaatgctgtggctcttcttccagagaatgacacaggtgaaagcatgctatggaaagcaaccattgtactcagtagaggagtatcagttcagtatcgctacttcaaagggtactttttagaaccaaagactatcggtggtccatgtcaagtgatagttcacaagtgggagactcatctacaaccacgatcaataacccctttagaaagcgaaattattattgacgatggacaatttggaatccacaatggtgttgaaactctggattctggatggctgacatgtcagactgaaataagattacgtttgcattattctgaaaaacctcctgtgtcaataaccaagaaaaaattaaaaaaatctagatttagggtgaagctgacactagaaggcctggaggaagatgacgatgatagggtatctcccactgtactccacaaaatgtccaatagcttggagatatccttaataagcgacaatgagttcaagtgcaggcattcacagccggagtgtggttatggcttgcagcctgatcgttggacagagtacagcatacagacgatggaaccagataacctggaactaatctttgattttttcgaagaagatctcagtgagcacgtagttcagggtgatgcccttcctggacatgtgggtacagcttgtctcttatcatccaccattgctgagagtggaaagagtgctggaattcttactcttcccatcatgagcagaaattcccggaaaacaataggcaaagtgagagttgactatataattattaagccattaccaggatacagttgtgacatgaaatcttcattttccaagtattggaagccaagaataccattggatgttggccatcgaggtgcaggaaactctacaacaactgcccagctggctaaagttcaagaaaatactattgcttctttaagaaatgctgctagtcatggtgcagcctttgtagaatttgacgtacacctttcaaaggactttgtgcccgtggtatatcatgatcttacctgttgtttgactatgaaaaagaaatttgatgctgatccagttgaattatttgaaattccagtaaaagaattaacatttgaccaactccagttgttaaagctcactcatgtgactgcactgaaatctaaggatcggaaagaatctgtggttcaggaggaaaattccttttcagaaaatcagccatttccttctcttaagatggttttagagtctttgccagaagatgtagggtttaacattgaaataaaatggatctgccagcaaagggatggaatgtgggatggtaacttatcaacatattttgacatgaatctgtttttggatataattttaaaaactgttttagaaaattctgggaagaggagaatagtgttttcttcatttgatgcagatatttgcacaatggttcggcaaaagcagaacaaatatccgatactatttttaactcaaggaaaatctgagatttatcctgaactcatggacctcagatctcggacaacccccattgcaatgagctttgcacagtttgaaaatctactggggataaatgtacatactgaagacttgctcagaaacccatcctatattcaagaggcaaaagctaagggactagtcatattctgctggggtgatgataccaatgatcctgaaaacagaaggaaattgaaggaacttggagttaatggtctaatttatgataggatatatgattggatgcctgaacaaccaaatatattccaagtggagcaattggaacgcctgaagcaggaattgccagagcttaagagctgtttgtgtcccactgttagccgctttgttccctcatctttgtgtggggagtctgatatccatgtggatgccaacggcattgataacgtggagaatgcttagtttttattgcacagaggtcattttgggggcgtgcaccgctgttctgggtattcatttttcatcactgagcattgttgatctatgccttttgggcttctcagttcaatgaagcaataatgaagtatttaactctttcactacagttcttgcaagtatgctatttaaattacttggccaggtataattgccagtcagtctctttatagtgagaaaatttattggttagtaatataaatattttaaactaaatatataaatctataatgttaaacatatgttcattaaaagcatagcactttgaaattaactatataaatagctcatatttacacttacagcttttcatttgatcaggtctgaaatctttagcacttaaggaaaatgactatgcataattatacctgaccatgaaaaaaataagtacctcaaatgcatgcatttgcactggtgattccaactgcacaaatctttgtgccatcttgtatataggtattttttacatgggttgacatgcacacaacaccattttcattcagtatgaaccttgaggctgctgccatttttccacttaaccaaaccagcctgaaggtgaacctcgaaacttgtttcataaatctttcaaaagttgttttacatcaatgttaaaatttcaaaatgctgcagggtaatttaatgtataaaatattagtaagaaaaagtatgtattgcatacttagtagaatagatcacaacatacaaattcaattcagtgcatgctttaggtgttaagcatgagattgtacatgtttactgttaggtccttgcatctgtggtgctaggtgagtatgagaagatgtcaaggactggacgtattttgttgcctaaaaaaaaaaggctgtttgtaggcgttttaaatatgcttattttgtgtgtctctcactacctattacacactgttgctttgtgggtttgttttgtatgtgcgtgtgttatacagtagttaaatttccatgcagaaaaataaatgtcctgaattttcatattagtattctttattgtatatcatgcatgtaatttatttagaaatgtaggtcttactaaatgtatatgcatgtatttcagattatactaggatttcttggattagaagcagattgtgttaactgtaacttaaagaatgaatgttaaataaaatgatacagatttattttcttcattacaaaatgaaatttcaagaaggtgttacttttgtagaatggttttataatatgacaagaaattttaatatagtgtctaccctaaagggatggcttatttgcatctaccttttactgcatgtttttcacaaggcagtttattcatatattgacatattttggtagtagctgagaacctaagacttgaaattatacattgtgtagtattttttaagctaagcaatgcaattttggtcagatcttatttgtgtgaagataggctctgaaatcctatggtattgcgtttgtaacgttgatattaatgcaaaatagtttaggaaatggagtcttctgcaagggttctgtatacttttcccacattgtatgagattttccaaaattttggtgtgaattgggcacttttggaaaactcctgaaaaagaattagtttccttcatctgcagacctttgtccaatacggttaccatttctttatagtaactcgattagccatatatgtttgtttctagtcctgctcctttgctcctctcctatgccttcccagtgctggctccattttgaagactcaaggacagaggggaagcagatcataaagagaaaaaggagacagaagaaaggatgaaggaaggaggtcatggggagtgtggcttctgagcagtttagttgctggggagagcagacagtcactgcctacaatacagacagaaccttcctgctcactttctgtcctatctcttcctgaccttatgaaccagtgttagtagatgattaaaacatgacaagcaatggctccttattttcacaggactaagtccgggccttcgtatcactagctgttgccttttacaccctgcttcagccaccctgtccctgtcattggccctggacttcctctctgtgcccgtgtgtcctctgcctgggagccctctcctcccatagtcactttctctctgccaaactcatttcttcttgtgcccaagacctctctcctgagcccttgtggaaacttcaggaaggatgaatccgtctttgtgctccacggctcgtaccttgatcaggctgtgcatcacagtaattctgttctaggtaggcagagttgatctttgtctcatctgccaggctgcaggctcttcaagggcagggaccttgtcatagtcatttttattttcacagtgcttggaacatggtggaaaatgaatgttggaattattggagtaatataatttgtatcaaatgtccttttgaattaagagatttagttatgtttactaagaatgtaaactttgaattggtttgcattttaacaattaggatggtttattgatgtgaattttgaaatgtagaggtataatgttaaattattttatactttatggaaatcaagtgaaatgtttgaaaaaatgccgccattatcctctggtattttctactctctggaattatgtgctgtaaatgatcggctgtaaatgtgaggcacaccacccacccctgtgtggaaagtgttgtggcgcttcctgccacccacccacctctctgccgttgctccttgtgacacttgtctgtcgtctcccatccaaactccaagcttacagctacctcagtactgctttgcttgtctgaaacacctcctttgccttccttcagtgtcccgctcaggtgcagcctcctccctaaagctcatctcagcttttgatctgaatgatgatggaaacatgcagacagcctctcagtcttactatttaatgttgtagctgggaaaaaacccagagaggttaactgatatactgggttgggactaggatgtgggttttgtgactctgaatcccatgttctcaaactacgctgccttccgaagtctggcatttgttagctcatgcttccttgtagtccagcttcttatgtgcctgttatattctccagtaagattgtaagccccttaagggcagggacgtctttgcatctctagcactgctatagtgttctatccttagttatgaactagataaataaatggtggtggcaacaatcctaaaaaaaaaaaaaaaaaaaa

SEQ ID NO: 236 - DNA, 3275 bp, Homo sapiens
gaagtcaagacgtctggaaagaattacccagtcctggcttcgagcagcccattgaaccagagacttgaaacagccccagccaaagacttttctcccaattctgcgcttcctgggttctgctgagtcttccacaggctttttttttttttttttttttttttaagacgaaaaagagattttctgttatcgggggcagaaagactgaagcccaaaaaaaaaaaaaaaaaaaaaagaaaagaaaagaaaaaagaaaagttaatttatttttaaagcataatttttttaagaattagactgaagtgcaacggaaacataaagagaatattagtgaaattattttttaaagtggggaagaatcaaacatttaagactcccctatcctttttaaatgttgtttttaaatttcttattttttttggccggtcgtctcaaattcatctgatctcttattacctcaattttggaaactgcccgccaccgaccctccgggaccacacagacaggctgaggacgactttatgaccaagagctgaacaagatgcattgtgagaggtttctatgtatcctgagaataattggaaccacactctttggagtctctctcctccttggaatcacagctgcttatattgttggctaccagtttatccaaacggataattactatttctcttttggactgtatggtgcctttttggcatcacacctcatcatccaaagcctgtttgcctttttggagcaccgaaaaatgaaaaaatccctagaaacccccataaagttgaacaaaacagttgccctttgcatcgctgcctatcaagaagatccagactacttaaggaaatgtttgcaatctgtgaaaaggctaacctaccctgggattaaagttgtcatggtcatagatgggaactcagaagatgacctttacatgatggacatcttcagtgaagtcatgggcagagacaaatcagccacttatatctggaagaacaacttccacgaaaagggtcccggtgagacagatgagtcacataaagaaagctcgcaacacgtaacgcaattggtcttgtccaacaaaagtatctgcatcatgcaaaaatggggtggaaaaagagaagtcatgtacacagccttcagagcactgggacgaagtgtggattatgtacaggtttgtgattcagacactatgcttgacccagcctcatctgtggagatggtaaaagttttagaagaagatcccatggttggaggtgttgggggagatgtccagattttaaacaagtacgattcctggatctcattcctcagcagtgtaagatattggatggcttttaatatagaaagggcctgtcagtcttattttgggtgtgttcagtgcattagtggacctctgggaatgtacagaaactccttgttgcatgagtttgtggaagattggtacaatcaagaatttatgggcaaccaatgtagctttggtgatgacaggcatctcacgaaccgggtgctgagcctgggctatgcaacaaaatacacagctcgatctaagtgccttactgaaacacctatagaatatctcagatggctaaaccagcagacccgttggagcaagtcctacttccgagaatggctgtacaatgcaatgtggtttcacaaacatcacttgtggatgacctacgaagcgattatcactggattctttcctttctttctcattgccacagtaatccagctcttctaccggggtaaaatttggaacattctcctcttcttgttaactgtccagctagtaggtctcataaaatcatcttttgccagctgccttagaggaaatatcgtcatggtcttcatgtctctctactcagtgttatacatgtcgagtttacttcccgccaagatgtttgcaattgcaacaataaacaaagctgggtggggcacatcaggaaggaaaaccattgttgttaatttcataggactcattccagtatcagtttggtttacaatcctcctgggtggtgtgattttcaccatttataaggagtctaaaaggccattttcagaatccaaacagacagttctaattgttggaacgttgctctatgcatgctattgggtcatgcttttgacgctgtatgtagttctcatcaataagtgtggcaggcggaagaagggacaacaatatgacatggtgcttgatgtatgatcttccatgttttgacgtttgcagtcacacacaacaccttagttcctctaggggctgtacagtattgtggcatcagataatgccaccaaaggagacatatcactgctgctgggacttgaacaaagacatttatatgggtttattttcattctgccaaagtaaaacaatacatcaacaagaagaaactcagatttaacctgttatttctatgaaaatgggatgaattctttgtttatgcactttttccttactgtgcatccgcctgaaagtgttttgccctatatacctcactagccatgctttatgtgggttatcatggaagaaaaggattttggaaactcaaggaaaagttctttcaacctatacaacctaacttatggactgttttgatagatgataattttttttttttaggaaggattttctttttaactttaccaaatgaaatgccaaaggaagttttaaaggccgttggctgtgctgtattttgatataattgtactgtgtttttaaattttgtatgccaatcttaaagacaaattttgcatattctctattttacttttctgccaaaataaacctgttcttccttttttaaaataaaataagttcttaaaaaatttatacttaaaaaatcctgcccaaaatgtgaagcttggttgactgatgttcatgatagaaagaataaaatgtttctctctctctaccttttaaaattgaatagtttatttctgtgaaagaagtatttaaactttcaatattttaactttttgtttttatttcttttagaaaaggccaatatacctatcacactttggaagtaaaaatacacactttcgtgtgtacctaaaaaaaaaatcgttgaaaatcaaggccaaaggtagtgcaattttttcattaagatttaaaaaaaagggaatgatagtctttgaaagaaaacagtaggcatccagcactggacaaaacatgggtatcaaagatgaataatctttggagattctggcagtgttttcccagaacaagtcaagtggaaagtggagaaattatctgtataattttggacacatacaatgcagtt

SEQ ID NO: 237 - DNA, 2381 bp, Homo sapiens
attcggccgaaggagctacgcgggccacgctgctggctggcctgacctaggcgcgcggggtcgggcggccgcgcgggcgggctgagtgagcaagacaagacactcaagaagagcgagctgcgcctgggtcccggccaggcttgcacgcagaggcgggcggcagacggtgcccggcggaatctcctgagctccgccgcccagctctggtgccagcgcccagtggccgccgcttcgaaagtgactggtgcctcgccgcctcctctcggtgcgggaccatgaagctgctgccgtcggtggtgctgaagctctttctggctgcagttctctcggcactggtgactggcgagagcctggagcggcttcggagagggctagctgctggaaccagcaacccggaccctcccactgtatccacggaccagctgctacccctaggaggcggccgggaccggaaagtccgtgacttgcaagaggcagatctggaccttttgagagtcactttatcctccaagccacaagcactggccacaccaaacaaggaggagcacgggaaaagaaagaagaaaggcaaggggctagggaagaagagggacccatgtcttcggaaatacaaggacttctgcatccatggagaatgcaaatatgtgaaggagctccgggctccctcctgcatctgccacccgggttaccatggagagaggtgtcatgggctgagcctcccagtggaaaatcgcttatatacctatgaccacacaaccatcctggccgtggtggctgtggtgctgtcatctgtctgtctgctggtcatcgtggggcttctcatgtttaggtaccataggagaggaggttatgatgtggaaaatgaagagaaagtgaagttgggcatgactaattcccactgagagagacttgtgctcaaggaatcggctggggactgctacctctgagaagacacaaggtgatttcagactgcagaggggaaagacttccatctagtcacaaagactccttcgtccccagttgccgtctaggattgggcctcccataattgctttgccaaaataccagagccttcaagtgccaaacagagtatgtccgatggtatctgggtaagaagaaagcaaaagcaagggaccttcatgcccttctgattcccctccaccaaaccccacttcccctcataagtttgtttaaacacttatcttctggattagaatgccggttaaattccatatgctccaggatctttgactgaaaaaaaaaaagaagaagaagaaggagagcaagaaggaaagatttgtgaactggaagaaagcaacaaagattgagaagccatgtactcaagtaccaccaagggatctgccattgggaccctccagtgctggatttgatgagttaactgtgaaataccacaagcctgagaactgaattttgggacttctacccagatggaaaaataacaactatttttgttgttgttgtttgtaaatgcctcttaaattatatatttattttattctatgtatgttaatttatttagtttttaacaatctaacaataatatttcaagtgcctagactgttactttggcaatttcctggccctccactcctcatccccacaatctggcttagtgccacccacctttgccacaaagctaggatggttctgtgacccatctgtagtaatttattgtctgtctacatttctgcagatcttccgtggtcagagtgccactgcgggagctctgtatggtcaggatgtaggggttaacttggtcagagccactctatgagttggacttcagtcttgcctaggcgattttgtctaccatttgtgttttgaaagcccaaggtgctgatgtcaaagtgtaacagatatcagtgtctccccgtgtcctctccctgccaagtctcagaagaggttgggcttccatgcctgtagctttcctggtccctcacccccatggccccaggcccacagcgtgggaactcactttcccttgtgtcaagacatttctctaactcctgccattcttctggtgctactccatgcaggggtcagtgcagcagaggacagtctggagaaggtattagcaaagcaaaaggctgagaaggaacagggaacattggagctgactgttcttggtaactgattacctgccaattgctaccgagaaggttggaggtggggaaggctttgtataatcccacccacctcaccaaaacgatgaagttatgctgtcatggtcctttctggaagtttctggtgccatttctgaactgttacaacttgtatttccaaacctggttcatatttatactttgcaatccaaataaagataacccttattccataaaaaaaaaaaaaaaaaaaaaaaa

SEQ ID NO: 238 - DNA, 9732 bp, Homo sapiens
gctggaggcaggaatgtgcctgcttactaatgagcgacgtgcaccggcgcgcacggcccggccaccgctgcggctgcggcggccggcggcggcccgttgtcaggtggagcctttgaattttttaaaagaccatagtaatcagatctacttgaaaaattaagtgaattgatttggttggaatgctcttttaccgatgctttaacatacagccactagattcccagaagttgtgcatgagttcctgtgaggagagttggcatcttggaaatcaaagacggttgtgatgcagttttttgatatgaggataacaggaagcgtcaggacaatcatgcccataagaactctaaactgttcagatcattttatcttagtgaaactggcaattgaactttgctctagttgatgggcaaaatttctcctagactattcatcatcccaatttcatcctagttgaaaattttcaaatgccataagaaatctttatagatttgcacttagcttttggatggacgtttctacaatggagagaactgtgttatagccctggtccaaggacattactagctaatgcccatcgactgtggtgtgcgtgtggaaggttccaaagagaaggagcaatcagcaagtttgcagacaccctggaacatggaagcaaccaagctttaagaagcacagctttggagacactccatgagtctgcactgctttcaggggaactagcacttaagaccttgtgtaacaaaatggacactggggacacagctctaggacaaaaagctacctcaaggtctggagaaactgataaagcatcaggtagatggagacaggaacaatcagctgttattaagatgagcacttttggcagtcatgaaggacagcggcaaccacaaatagagcctgagcaaatcggaaacacagcatcagcacaactgtttggttctgggaaactggcctcccctagtgaagtggtgcagcaagtcgcagagaagcaatatccaccgcatcgtccgagtccttactcatgccaacactcactctctttccctcagcactcattgccacagggggtcatgcacagcaccaagccacatcagagcctcgaaggtcctccgtggcttttccctggccctttgccatccgttgcctctgaggacttatttccttttcctatacatggccacagtggtggttatcctagaaaaaagatttcaagtctgaaccctgcttatagccaatactcccagaaaagtattgaacaggcagaagaggctcacaagaaagagcacaaacccaaaaagcctggcaagtacatttgcccttactgcagcagagcgtgtgccaaacctagtgtactgaaaaaacacatcaggtcccatactggggagcggccatatccatgtataccttgtggtttctctttcaagacaaagagcaatttgtacaagcacaggaagtcacatgcccatgcaattaaggcaggattagtacctttcacagagtcagctgtatctaaattggacctagaggctggttttattgatgtagaagcagaaatacattcagatggtgaacagagtacagacacagatgaggagagttctttatttgccgaggcttctgacaaaatgagtcctggtccacccatcccactggacattgccagcagaggcggctatcatgggtcattggaagaatcattgggaggtccaatgaaggtgccgattttgattatccctaaaagtgggattcctctccctaatgaaagctctcagtatattggccctgatatgctaccaaatccatctttaaatactaaggctgatgattcgcacacagtcaaacagaaacttgcactaagactgtcagagaaaaaaggacaagattctgagccatcgctcaaccttctgagcccgcacagtaaaggaagcactgattctggttacttttctcgctcagaaagtgctgagcagcaaataagccctcccaacacaaatgcaaagtcttatgaagaaatcatctttggaaaatactgtcggcttagtccgagaaatgcactcagtgttacaaccacaagtcaggagcgtgccgcaatgggtaggaagggcataatggaaccattacctcacgttaacaccaggttagatgtcaagatgtttgaagatcctgtttcacagctgatcccaagcaagggagatgtcgaccccagtcaaacgagcatgctgaaatccactaagttcaacagtgagtccagacaaccccagattattccatcatctatcaggaacgaaggaaaactttatccagcaaacttccaaggcagcaacccggttctcttagaagctcctgtagactcttcaccccttattagaagcaactcagtgccaacttcttcagcaactaatctaactattcctccttctttgagaggaagtcactcatttgatgaaaggatgactggttccgacgatgtattctatccagggaccgtgggcataccccctcagcgcatgctaagaagacaagcggcatttgagctgccttcggtacaggagggccacgtggaagtcgagcaccatggcaggatgttgaagggtatcagcagttcatccctgaaggaaaagaaattgtctcctggggacagggttgggtatgactatgatgtctgtcggaaaccctataagaagtgggaggactctgaaacaccaaagcaaaactacagggacatttcctgcttgagttctttaaagcatggtggagaatatttcatggatcccgtggtgccattgcagggagtaccaagcatgtttggaactacctgtgaaaacaggaaacgccggaaagagaagagcgtaggggatgaagaggacacgcccatgatctgcagcagcattgtaagcactcctgtgggcatcatggcttccgattatgaccccaaactgcagatgcaggaaggagtcaggagtggatttgccatggctggacacgaaaacctttctcatggtcacacggaacgctttgacccatgtcggccccaactgcagcctggaagtccatctcttgtgtcagaggagtcaccttcagccattgattcagacaagatgtcagacctagggggcaggaaacctcctggaaatgtgatttctgtgattcagcacaccaactcactgagccgacccaattcatttgaaaggtctgagtcagccgaacttgtggcttgcacacaggataaagccccttccccttcagagacttgtgacagtgagatttcagaagccccagtgagtcctgagtgggctccacctggggatggtgcagaaagtggggggaaaccctctccatctcagcaggtgcagcagcagtcctatcacacacagcccaggctagttcggcaacacaacatccaggttcctgagattcgagtgaccgaggagcctgataaacctgagaaggagaaggaagcccagagcaaagagccagagaagcctgtggaagaatttcagtggccccagagaagtgagaccctttcccagctccccgcggagaagttgccacccaaaaagaagcgtctgcgacttgcagatatggagcactcctcaggggagtccagctttgaatccacaggcacaggcctctcccgcagccccagccaagaaagcaacttgtcccacagctccagtttctccatgtcttttgaaagagaagaaaccagtaagctttctgcacttcctaagcaggatgagtttgggaagcattcagagtttctgactgtccctgctggttcatactcattgtctgtcccaggccatcaccaccagaaagagatgcgacgctgctcatcagagcagatgccttgtcctcacccagcggaagtcccagaagttcggagcaaatcatttgattatgggaatctgtcccatgctcctgtgtcgggagcagcagcctccacggtatcaccgtccagggagaggaagaaatgctttctggtgcggcaagcttccttcagtggctccccagaaatctcccagggcgaggttggcatggatcagagcgtgaagcaagagcagctggagcacctgcatgctggcctccggtccgggtggcaccatggcccgcctgctgtgctgcctcctcttcagcaagaggacccagggaagcaggtggcgggtccttgtcccccgctgagctcggggccactgcacctggcccagccacagatcatgcacatggacagtcaggaatctttgagaaatcccttgatccaaccaacatcctatatgacaagcaagcacttacctgaacagccacacttatttccacatcaagagacaattccattttctccaatccagaatgccttgtttcagtttcagtatcctacagtttgtatggttcatttaccagctcagcagcctccctggtggcaggcacatttcccacatccctttgctcagcaccctcagaagagctatggcaagccctcttttcagacagaaatccattcgagctatcccttagagcatgtggcagagcacactggaaagaaacctgctgagtatgcacacacgaaagagcagacctacccatgttattcaggagcatcagggctacacccaaagaaccttcttccaaagtttccatcagaccagagcagtaagtcaactgaaacgccctctgagcaggttcttcaagaagattttgcctcggcaaatgctgggtctttgcagtccctcccaggaacagtggttcctgttcggatccagacgcacgtaccatcctatggaagtgtcatgtacacaagcatttctcagatacttgggcagaatagccctgccattgtcatatgcaaagtcgatgagaatatgacccaaaggacactggtcaccaacgcagccatgcaagggataggattcaacattgcccaggtgctggggcagcatgcgggcttggagaagtaccccatttggaaagcacctcagactttgcccctcggcttagaatcctccatccccttgtgtttaccttccacctctgacagcgtggccaccctgggaggtagcaagcgaatgctttctccagccagtagcttggagctcttcatggaaaccaagcagcagaaaagggtcaaagaagaaaagatgtacggacagattgtggaggagcttagtgctgtggagctgaccaactcagacatcaaaaaggacctctcccgcccccagaaaccccagctggttcgacaaggatgtgcttctgagccaaaagatggcttgcagtcagggtcatcttccttctcctcgctgtcgccctcctcatctcaagactatccttctgttagcccgtcttccagggagccattcctgcccagcaaggagatgctttccggttcccgggcaccacttccggggcagaagtccagtgggccttctgaaagcaaagaatcttcagatgaattagatatcgatgagacggcatcggacatgagcatgagcccacagagttcttcattaccagcaggagatggtcagctggaagaggaagggaagggccacaagcggcctgttggcatgctggtccgcatggcctctgcccccagcgggaacgtggcagactcaactcttcttctcacggacatggcagatttccagcagattcttcagttccccagtctgcggacaacaactactgtgagttggtgcttcttgaattatacaaaacccaattatgtgcaacaggccaccttcaaatcctcggtttatgcttcatggtgcattagttcctgtaatccaaacccatcaggattgaacaccaagaccacgctggctcttctgaggtccaagcaaaaaatcactgcagaaatttatactctggctgctatgcataggcctggaaccggcaagcttacatcatcaagtgcttggaagcagtttactcagatgaaacctgatgcgtcctttttatttggcagcaaactagaaaggaaactagtgggaaatatcttaaaggaaagagggaaaggagatattcatggagataaagatattggatccaaacaaactgagccaatccgaattaaaatatttgaaggagggtacaaatcgaatgaagattatgtatatgtcagaggacgtggccggggaaagtacatttgtgaagaatgtgggattcgctgtaagaagccaagcatgctcaaaaaacacatccgtacccatactgatgttcggccttatgtatgcaagttatgtaactttgccttcaaaacgaaaggaaacctaacgaagcatatgaaatctaaagcacacatgaaaaaatgcctggaattgggagtctcaatgacatcggtggatgatacagaaactgaggaagcagaaaatttggaagatttgcacaaagcagcagagaagcatagcatgtccagcatttcaactgatcatcagttctccgatgctgaggaatcagatggtgaggatggagatgataatgatgatgatgatgaagatgaagatgactttgacgaccagggagatttaacaccaaaaacaagatcaagaagcaccagtcctcagcctcctagattctcctccttgcctgtgaatgttggcgccgtaccccacggggttccttcagatagttccctgggacattcttcgttgatcagctatttggttactttgccaagtattcgagttactcagcttatgacacccagtgattcatgtgaagatacccagatgacagaataccagaggctattccagagcaaaagtacggactcagaaccagacaaagacagattggacatacctagttgtatggatgaggagtgcatgctaccttcagagccaagctcctctcccagggacttctcaccctcaagccaccattcctctccaggatatgattcttcaccctgtcgagataattcaccaaagaggtatctgatacccaaaggagatttatctcccaggagacatttatcacctaggagagatctgtcacccatgagacatctttcaccaagaaaggaagctgcattgagaagagagatgtcccaaagagatgtttcaccaagaaggcatttgtctccaaggaggccagtgtctcctgggaaagatatcacagcaagaagagacctctctcctagaagagagagaagatacatgaccacaataagagcgccatctcccagaagggctttataccataacccaccattgtccatgggacagtatttgcaagcagagccaattgtattggggcctcctaatttaagaagaggattacctcaggttccttacttcagtctctatggagaccaagaaggtgcttatgaacatccaggctccagccttttccctgagggtcctaatgactatgtcttcagtcatcttccactccactctcagcaacaagtgcgagcccctatccccatggtgcccgttggtgggatccagatggttcactccatgccgccagccctttccagtttacatccttcacccacattgcccctgccaatggagggctttgaggagaagaaaggcgcgtcaggggagtccttctccaaggacccctatgtgctttctaagcagcatgagaagcgaggtcctcacgctttgcagtcatctggtccacctagcactccctcctctcctcggctgttgatgaaacagagcacttcggaagacagcctaaacgcaacagagcgggaacaggaggaaaatatacagacttgtacaaaagccattgcctctctccggattgccacggaagaggcagctctgctcgggccagatcagccagcgcgggtgcaggagccccaccagaaccccctgggaagtgcacatgttagcattagacactttagtagacctgagccaggtcagccctgtacctcagccacccaccctgacttgcatgatggtgaaaaggacaattttggtacatcacagactccattagctcactccacgttttacagcaagagttgtgtggatgacaagcagttggactttcacagcagcaaggaattatcttcaagcacagaggaaagcaaagatccttcatcagaaaagagtcagctacattgatctatgatgcatggagactttcatttccacattttcccatttttttgtttttgtttttctagaaatggaggtaatccagtttatagcatgcctgtcctaagttacagtagtttgctattatatatacttttgttatatcaaaagaattaggtaaattaacaagtcatcatgagcctgaccaaaacaaaatttgaaattaacctattgggtctggtacttttaaaattgtacagatgtttgtgccttttctttactttgcttatattcttataagcattttttagcagtaatttgtacatattttagaatttgtgtatctgctttgtaataaatgtaatttctttccttttttggacacttggatctaaatgatgtaaagcaaaacagcatcaatatatatgtgaggttgcactaaaacatatttttatatgattaaaactgaacagcttttatgtacagctctgattctgtaatactaatatttatttactttgtttcataaattgtacattttttcttaatgttgtggattgcttttctatgtgaagcatgggatttactgttgcgtaactagaacaaaaatgtacattgtaaacaagatatttaaactagagtatcttattctgcacttatgcattagttaaaaaaagataaaggatgtatcagtcagttcttaactcttgtatatttttttgtctcttgtttgctggattgactataacttaagtgctgattgtgattttaaaatgatagtaccgtaaagcattaaagtaaacaatgtgctattgtgagttttttcaaagctttataaatcagttataaataatattaaaagtatttggtcttatgtgaacatgttgatctatatactcatctaaaaatatgggaaaacattccaccccatgtaaatatgtacaagtgcatcactggtacaattttatgtaactcagttggacactaggttgccacagacctatgctaggtgtctttaaaaaattaaggtgacaaagcacatgggactgtgtagagcttggttatcggccggcccggtggcttggcaggcagtgctgtgcgctgctcatggagaagacctgggcttagcaatctccttagttcttgctacacaggatggtgactggaactaaggctacacagagggtcgcacttggactctgagggttgggtgtggaagggggaaaaggagatggagacctgctccccagctcttcctgtcagccggtttacatgggaacagggttaacatctgtgttaggggaggtcaccttaccctttttcataggggaagagtgtcacactcctggctatctcagggggaatggggaaaagaatctttcaagggcaaagaactcgtgggaggatgtctgttgtatgtaatactcacaatggcttttggttagtgttgaaggtgggaagagcatttgtaggtccagaagagtgaaagagagggaggggtgcagcaacatgtgcacaggcacgcacatgtgtgcacgcacacatacaatctgggttatctttgtgctatatagtggattataattctgtgaaaccaagtttgtatattgaattacattaaggagtgttctttaaaaagagaaataaatatacaattacatgcttgaaaaaaaaa

SEQ ID NO: 239 - DNA, 3249 bp, Homo sapiens
caagcttagcctggccgggaaacgggaggcgtggaggccgggagcagcccccggggtcatcgccctgccaccgccgcccgattgctttagcttggaaattccggagctgaagcggccagcgagggaggatgaccctctcggcccgggcaccctgtcagtccggaaataactgcagcatttgttccggaggggaaggcgcgaggtttccgggaaagcagcaccgccccttggcccccaggtggctagcgctataaaggatcacgcgccccagtcgacgctgagctcctctgctactcagagttgcaacctcagcctcgctatggctcccagcagcccccggcccgcgctgcccgcactcctggtcctgctcggggctctgttcccaggacctggcaatgcccagacatctgtgtccccctcaaaagtcatcctgccccggggaggctccgtgctggtgacatgcagcacctcctgtgaccagcccaagttgttgggcatagagaccccgttgcctaaaaaggagttgctcctgcctgggaacaaccggaaggtgtatgaactgagcaatgtgcaagaagatagccaaccaatgtgctattcaaactgccctgatgggcagtcaacagctaaaaccttcctcaccgtgtactggactccagaacgggtggaactggcacccctcccctcttggcagccagtgggcaagaaccttaccctacgctgccaggtggagggtggggcaccccgggccaacctcaccgtggtgctgctccgtggggagaaggagctgaaacgggagccagctgtgggggagcccgctgaggtcacgaccacggtgctggtgaggagagatcaccatggagccaatttctcgtgccgcactgaactggacctgcggccccaagggctggagctgtttgagaacacctcggccccctaccagctccagacctttgtcctgccagcgactcccccacaacttgtcagcccccgggtcctagaggtggacacgcaggggaccgtggtctgttccctggacgggctgttcccagtctcggaggcccaggtccacctggcactgggggaccagaggttgaaccccacagtcacctatggcaacgactccttctcggccaaggcctcagtcagtgtgaccgcagaggacgagggcacccagcggctgacgtgtgcagtaatactggggaaccagagccaggagacactgcagacagtgaccatctacagctttccggcgcccaacgtgattctgacgaagccagaggtctcagaagggaccgaggtgacagtgaagtgtgaggcccaccctagagccaaggtgacgctgaatggggttccagcccagccactgggcccgagggcccagctcctgctgaaggccaccccagaggacaacgggcgcagcttctcctgctctgcaaccctggaggtggccggccagcttatacacaagaaccagacccgggagcttcgtgtcctgtatggcccccgactggacgagagggattgtccgggaaactggacgtggccagaaaattcccagcagactccaatgtgccaggcttgggggaacccattgcccgagctcaagtgtctaaaggatggcactttcccactgcccatcggggaatcagtgactgtcactcgagatcttgagggcacctacctctgtcgggccaggagcactcaaggggaggtcacccgcaaggtgaccgtgaatgtgctctccccccggtatgagattgtcatcatcactgtggtagcagccgcagtcataatgggcactgcaggcctcagcacgtacctctataaccgccagcggaagatcaagaaatacagactacaacaggcccaaaaagggacccccatgaaaccgaacacacaagccacgcctccctgaacctatcccgggacagggcctcttcctcggccttcccatattggtggcagtggtgccacactgaacagagtggaagacatatgccatgcagctacacctaccggccctgggacgccggaggacagggcattgtcctcagtcagatacaacagcatttggggccatggtacctgcacacctaaaacactaggccacgcatctgatctgtagtcacatgactaagccaagaggaaggagcaagactcaagacatgattgatggatgttaaagtctagcctgatgagaggggaagtggtgggggagacatagccccaccatgaggacatacaactgggaaatactgaaacttgctgcctattgggtatgctgaggccccacagacttacagaagaagtggccctccatagacatgtgtagcatcaaaacacaaaggcccacacttcctgacggatgccagcttgggcactgctgtctactgaccccaacccttgatgatatgtatttattcatttgttattttaccagctatttattgagtgtcttttatgtaggctaaatgaacataggtctctggcctcacggagctcccagtcctaatcacattcaaggtcaccaggtacagttgtacaggttgtacactgcaggagagtgcctggcaaaaagatcaaatggggctgggacttctcattggccaacctgcctttccccagaaggagtgatttttctatcggcacaaaagcactatatggactggtaatggttacaggttcagagattacccagtgaggccttattcctcccttccccccaaaactgacacctttgttagccacctccccacccacatacatttctgccagtgttcacaatgacactcagcggtcatgtctggacatgagtgcccagggaatatgcccaagctatgccttgtcctcttgtcctgtttgcatttcactgggagcttgcactatgcagctccagtttcctgcagtgatcagggtcctgcaagcagtggggaagggggccaaggtattggaggactccctcccagctttggaagcctcatccgcgtgtgtgtgtgtgtgtatgtgtagacaagctctcgctctgtcacccaggctggagtgcagtggtgcaatcatggttcactgcagtcttgaccttttgggctcaagtgatcctcccacctcagcctcctgagtagctgggaccataggctcacaacaccacacctggcaaatttgattttttttttttttccagagacggggtctcgcaacattgcccagacttcctttgtgttagttaataaagctttctcaactgccaaa

SEQ ID NO: 240 - DNA, 2175 bp, Homo sapiens
agtacagtataaaacttcacagtgccaataccatgaagaggagctcagacagctcttaccacatgatacaagagccggctggtggaagagtggggaccagaaagagaatttgctgaagaggagaaggaaaaaaaaaacaccaaaaaaaaaaataaaaaaatccacacacacaaaaaaacctgcgcgtgaggggggaggaaaagcagggccttttaaaaaggcaatcacaacaacttttgctgccaggatgcccttgctttggctgagaggatttctgttggcaagttgctggattatagtgaggagttcccccaccccaggatccgaggggcacagcgcggcccccgactgtccgtcctgtgcgctggccgccctcccaaaggatgtacccaactctcagccagagatggtggaggccgtcaagaagcacattttaaacatgctgcacttgaagaagagacccgatgtcacccagccggtacccaaggcggcgcttctgaacgcgatcagaaagcttcatgtgggcaaagtcggggagaacgggtatgtggagatagaggatgacattggaaggagggcagaaatgaatgaacttatggagcagacctcggagatcatcacgtttgccgagtcaggaacagccaggaagacgctgcacttcgagatttccaaggaaggcagtgacctgtcagtggtggagcgtgcagaagtctggctcttcctaaaagtccccaaggccaacaggaccaggaccaaagtcaccatccgcctcttccagcagcagaagcacccgcagggcagcttggacacaggggaagaggccgaggaagtgggcttaaagggggagaggagtgaactgttgctctctgaaaaagtagtagacgctcggaagagcacctggcatgtcttccctgtctccagcagcatccagcggttgctggaccagggcaagagctccctggacgttcggattgcctgtgagcagtgccaggagagtggcgccagcttggttctcctgggcaagaagaagaagaaagaagaggagggggaagggaaaaagaagggcggaggtgaaggtggggcaggagcagatgaggaaaaggagcagtcgcacagacctttcctcatgctgcaggcccggcagtctgaagaccaccctcatcgccggcgtcggcggggcttggagtgtgatggcaaggtcaacatctgctgtaagaaacagttctttgtcagtttcaaggacatcggctggaatgactggatcattgctccctctggctatcatgccaactactgcgagggtgagtgcccgagccatatagcaggcacgtccgggtcctcactgtccttccactcaacagtcatcaaccactaccgcatgcggggccatagcccctttgccaacctcaaatcgtgctgtgtgcccaccaagctgagacccatgtccatgttgtactatgatgatggtcaaaacatcatcaaaaaggacattcagaacatgatcgtggaggagtgtgggtgctcatagagttgcccagcccagggggaaagggagcaagagttgtccagagaagacagtggcaaaatgaagaaatttttaaggtttctgagttaaccagaaaaatagaaattaaaaacaaaacaaaaaaaaaaacaaaaaaaaacaaaagtaaattaaaaacaaaacctgatgaaacagatgaaggaagatgtggaaaaaatccttagccagggctcagagatgaagcagtgaaagagacaggaattgggagggaaagggagaatggtgtaccctttatttcttctgaaatcacactgatgacatcagttgtttaaacggggtattgtcctttccccccttgaggttcccttgtgagccttgaatcaaccaatctagtctgcagtagtgtggactagaacaacccaaatagcatctagaaagccatgagtttgaaagggcccatcacaggcactttcctacccaattacccaggtcataaggtatgtctgtgtgacacttatctctgtgtatatcagcatacacacacacacacacacacacacacacacacacaggcatttccacacattacatatatacacatactggtaaaagaacaatcgtgtgcaggtggtcacacttcctttttctgtaccacttttgcaacaaaacaa

SEQ ID NO: 241 - DNA, 9145 bp, Homo sapiens
acgtccctcgtggagccgccgacgtcagcagtcgaatggcaacattgtggcgatgctgaggcgcagagtttaggagacgggttcatcagtcaggccggctccgggctttctgcagcagcaccaggggcgggggcggggatcttgacctgggcgagcgaccgggacgcatacagcgccggcctgaccccgcgggacccgcgcctcaccaccggagcgccgcagacgcagctccacggcctcgcgcggggggcggcgggcggccgcgaggcgctgcggcagcgcggagcttgtaaacagatccggccgcaggtgaccatgtgaactacctgctcccgggacgcttattgtccttctctcgatccgcgccacaaaggagctcggcggtcggggcgcggagggacaggcgaacgagccgggagagccggccggcgcactaagatggctgaaggcgcccggcgagggtgagcggggggcgcggcgcagccagcggggagtcctcgggcgggccgggccggcggcccttccccgcggcgagaagccggagccaccatgtcgttcgcgctggaggagacgctcgagtcggactgggtggctgtgcggccccatgtgttcgacgagcgcgagaaacacaaattcgtctttattgtggcctggaacgagattgagggcaagtttgccataacctgccacaaccggacggcccagaggcagaggagcggctcccgggagcaagcgggggcgcgagggggcgccgaggccggcggagctgcgtccgacgggagccgcgggcccggcagcccggcgggcaggggtcggcccgaggccactgcctctgcaactctggttaggagccccgggccccggcggagctcggcctgggcggagggcggctctcctcggagcactcgcagccttctgggggacccgcggctgcggagtcctggcagcaaaggggcggagagtcgtcttaggagcccagtgcgggccaaacccatcccgggtcagaaaacatctgaagccgacgatgcggcgggggcagccgctgcagcagcccggccggcgcccagagaggcccaggtgtcctctgtacggatagtgagcgcctctgggacggtctccgaggagatagaggtgctggaaatggtgaaggaggacgaggcacctctggcgctctcggacgcggagcagccgccgcccgccaccgagctggagtctccggccgaagagtgcagctgggccggactgttttctttccaggacctgcgcgccgtgcaccagcagctgtgctcggtgaactcgcagttggagccgtgcctgccggtgttccccgaggaaccttcgggcatgtggactgtgctgtttgggggcgcccccgagatgaccgagcaggaaatcgacactctgtgttaccagctccaggtctacctgggccacggcctggacacctgcggctggaagatcctctcccaggtgctcttcaccgagaccgatgatcccgaggagtattacgaaagcctcagcgagctgcggcagaagggctacgaagaagtgcttcagcgggccaggaagcgcatccaggagctcttggataagcacaagaatacagagagcatggtggagcttctggacttgtatcagatggaggatgaagcctacagcagccttgcagaagctacaaccgaactctatcagtatttactacagccattccgagacatgagagaacttgccatgctacgaagacagcagatcaagatttccatggagaatgattatctgggacctcgaagaattgagagtctacaaaaagaagatgctgattggcagcggaaagctcacatggctgtactgtctattcaagatcttactgtcaagtactttgaaataacagctaaagctcaaaaagctgtgtatgatcgaatgcgagctgatcagaagaaatttggtaaagcatcatgggcagcggctgctgaacggatggaaaaactccagtatgcagtttctaaggaaactttgcagatgatgagagctaaagagatatgcttggaacagcggaaacatgcactaaaggaagagatgcagagtttgcggggtggtacagaagcgatagcacgattggatcagttagaagctgattattatgatctgcaacttcagttgtatgaagtacagtttgaaatcttgaagtgtgaagagttactattgacagcgcaactagaaagcatcaaaagacttatatcagaaaaaagagatgaagtggtatactatgacacttacgaaagcatggaggccatgctggagaaggaagagatggcagcatctgcgtacttacagagagaagagctgcagaaacttcagcagaaagcacgccagctggaagcaagacgtggacgggtttctgccaagaaatcctacctcagaaataaaaaggaaatatgtattgcaaaacacaatgaaaaaatccaacagcgcactcggattgaagatgaatatagaacccatcacacagtacaactaaagagagaaaaattacatgatgaagaagaaagaaaaagtgcctgggttagccaagagagacagagaacactggatagacttcgaacatttaaacagaggtatcctgggcaagtcatacttaaatcaaccagattacgactagctcatgcaagaagaaaaggtgcagcaagtcctgttctccaagaggatcattgtgactctttaccaagtgtgttacaggtagaagagaaaactgaagaggtgggagaaggaagagtcaagcgtgggccatcacagacaacagaaccccagagccttgtgcaacttgaagatacttcattaacacaacttgaagccacctcattacctctcagtggtgttacctctgaactgcctcccactatatctcttccacttttgaataacaacctcgaaccatgttctgttaccataaatccactcccatcccctcttcctccaacaccaccacctcccccacctcctccccctcccccaccaccaccacctctgcctgttgctaaggacagtggcccagagacactggagaaagatctgcctagaaaggaggggaatgagaagaggatcccaaagtcagccagtgccccctcagcacacctctttgacagcagccagctggtcagtgcacggaagaagctcagaaagactgctgaaggtttgcagaggaggagagtgagctcacccatggatgaggtgctagcctccttgaagcgtggtagttttcatctgaaaaaggttgaacagcgaactctgcctccttttcctgatgaagatgatagtaataatatcttggcacaaataaggaaaggggtaaaattgaagaaggtacagaaggatgttttgagagaatccttcacacttctacccgatacagaccctctaacacggagcatccatgaagctcttagaagaattaaagaagcatccccagagtcagaggacgaagaggaggctttaccttgcacagactgggagaactaacaagtgacataacagaagaaaaatatcattcaagattggttctgattcttttggaaaatgacagtttaagcacttggttcctcagttggataacattagatccaaagttcattggttcagtggtgtgaagaaaggaagcacaattggcaggttatcactttccagtcgttccaatagatgatggttaacatgaattttacatgtgcaatgttcctgactgcaatgaagaaaaggccttctggagatttctgttttttaagcacattctccttccatccacatatttacatccttgtaatggccagttaagctagggcttgctgtaagttggaagaacactgggttgacagagatctactgtgagctgtattgggactgctttgagaaccatctttcaatgcactgaaaagtcatctgaaaaaatagcttcttccatatcagcttatattaaatactgtgacactctgagaaagtttatcatcatgatagctgtaagtcaggcattaaaatcaaatggaaatacacctaaaatgtccgcattactcatttccaaaggatttttcataaagatgttcagcaacatctgaaaagctgcatttatggagatacatctattaatatgttcacaacatgatacatttaacatggcatatttttaggagtcttatactttgtaaggttttgaagtttccgtgcttttaaatcactcttcatatttcttgaatttataatagtttgaattttatgtgcatccttgtttatggaaggcagtactttgataatatttcaaattatttttattttgtttgaattattgcttgattgctatgactgacatgactttcctattgagaatcaaaaatcaagattcaatcatagggatgcagatcttaactcttttcacaaattaccattttaagtttttatttttatgctccacagtgaaaagcatgtgctctacaaagatagaaagtagagacaagtctccgtggctggcatttcaccatcttcacatgcactgaatggaattttgggagaatgcctttgttatagtcactaaaattttaaacttatacacagctttaggtgctgattttggctgtgatggagtcctgaaggacacatttatatgttccagattttcagcaggattgttgtgggcttgaatacatgtagatcattggactcagtgtgcagtaccctgtacatataattctgcataagacagatcttggcctttctgtggagggagttaagaactaaaataccaaaaatcactttatttcttttaagacaattatctggcctaaacccagaaagcagtactggagcaaaagcccagtgtatatgaattggtattcctagagaaaaaaagaaatgctcacacctttgttattttaaagtgttttcttgaaaataattagggagaaaattttctggcaacaggttatgtaagacaacaactttttttattatttcaaaacaaaacaggcacatgccaccatgccccagctaatttttatattttttatagagacagggttttgccatgttgcccacgctggtcttgaactcctggactcaagcaatctgccagcctcggcctgctaaagtgctaggattataggcgtgagcctctgtgcccagcctgacaaaatcttttatttatttaaatgttagtaatacgtttattgatgagactaggagcttctctgcagcatcttcataatacattggttttagttcccacactattcccacatcttatctgggaagattagaaatacagatgtaatatggaagcttcaacagcatgggggtggtgatagtgtcctatttgcccttggtaaaatattaaagcgtatttcttaacccaaagagtgattggttatatgaatatatttgaaaaagttaaagcaaatttgcaaacctttacaaaatcatgtatcaattttatgctatccagtttttacgtacccatgtgtcaacatttcatatatccagttctttgggtgctggttcactttttttcatttattcaaattcagaaaaatacggacggatctaatgttaaattaaccagaaaccctggaacattcatatcttgagagggaatttgctactcttttacttttgggatttcattataaaataggctcattttatacatatgtcctgtggtctgtcttccagagtgtgctgtaatcataagtctctagcaaagagtggagggtggagggtgtgtagaactccactcagcctcatggatacatctacaagtctctcaacccatcctgttacagttctccatgagagtcacctcacacttggaaaagaaggaggttaaagcagagtattgttggcagccagctatgcccatcctcttgtaaataactttccaacacacccatttccttgccttaaggtgcaggttcctacttctacaaaatttcaaatgattgcaggtcaaaaacctttggagttactcacaaataataataaaatttcaaataactagggtctacttgtccatcaagatgacattaccagtggaacccacctgttaattttaaagtagcttcagaacccaacaaaaattatgtaagcctggttaaatgtccttttttcttcttgcctctaataaaatcaggatcttcggccttgatactaaatatgtgtatatttagttatgatggtacttgtagatgctcacatttccagttccaaactcgcccgtactttttatgtgcttcaaaatattggacacatttctgttaatatatgatttctgtatccacaaaccgctgtttgcttatgctgagtcaatttagaagttaatttccaatctagtctcaactgcaatgcatttaaaataggtaaaacaagtaaatgagtttgggacattttgagattaatgttactgcccacttgactgtcaatttcaaatggctcctaatgcaaccaaaattataaccaatgtagcatgtgtaggaaaggtatttttaattatttaaaatcattgtgtatattacagcagtatgaggaatgcctggctaaagaggattttttaaaagatgaagaatggttttgcttgtattatataggcttactgagtttgtgagcagcataaaaacaatcattccttaattcttcattgtggaactgaaatatttctgtaatgcattttttaaaaggagactcctagacacagctgtaatagtgggaatagaaatgtagagcttttctcataacacaaaaccagaaaataattttcagcactttgacttactctatgtaataaggaaaaaaattgtttccacaaagttgaactatgtagtaatatttggtaacatatggcatggccactttatatcacagaatgtgtgtcaagttgcaaagcatacttgggccatagtagacactaagaattaaaactcttaaatcagtgaaacaaaaactaatgggcagcattctctctgtttggaatgggatcagtatacaattaatacaatttaattttacacattccctaagacaccatttttaagttacagtcacatgagtgtttgtataaatttaagtcaatgcttttagcctaggcaaagctaaatacaaggtttttggggttttcttttttcagctttattattgaagtattacaaacttaacatcagataccaatgtgtaaaaagtactattgggtccttaagggctctatcagggagttgaaatttcatacgctttaccaggttacttgtaaaaaatgaacagctgtaagacatttcaaaaccattgcagacacattgttaaaatgcagccatttgataatgaaagcagaaaccttaagttttacctaattattgcactaaatgtaaatgataacataaaattaagtgtgcattttaaacagattctatttcccacttactgcttagcatagaaaaagagctatggttagaggagtgaccagcaagatttatttcagatggaaaaggggtgagaaagtggaagcaccttactgttagagcatgttgcatctatttagtgctactgaacaattcagtagttatttctgaactttgctgcaaagtgctctttagttaaagcacattaagaagggtcactgcttaattgctttgtaaaatgaagcaatggtattttttatccgatatagtgtaatttaaaagttttcctacaaagtgagtttatattgttgcctaaactatgttatgtaagcaaagggtttggaaaggcgggagggagtctagattcggcgagagtgtgcgtttgtgtgtgtgaatgtatgaaaagtttccccattgggttattcttaagatgtgtttattgtaaagttttctacgttttgcccacagtaaatgtacaacttcgcaattgtaggatttaattgattgaattccaaatttatactgtctcttcccttctgcagagacattatgccactgtaaggtgcatgtacagaaaatacctctgaggttgacttgttaaataactgatgaatgttatttcacactgaatctcaaagcagtcatttgttttgcgggttaggggaaagttttgttttttgctggtgttttttgttgtttttaattaggcacactaagagtggctaaatttgggggaattggtggataggaaagaccttgaaaagtgatgtgtagatgaaaacacaaggtatggatgttggttacagagttcagttttaacaagggaaatttggggattttttttttttttacttgcatgttctatgggtagctatcaaagggtgtaacaaattattccagcttttcccaatactaattatattggttttaaaaagtctgcataatcactaggtggcattttcccttcatttgtgaaccaagaggggtaaatgatgctacccatacagtgacttctgagttctttaactttgacagaatctccattgtttcattgaatttctcattgtattatatgtctttccaagtgtgcaaactataatatgtagttaatgaaaaatggaaggctgcagattattttgcatgaataattaattgcccattagggctaaggagactgacatgatttttatcggttctgggtaaatgaaaattttaatggaaaactcattcaccatttactagctttgtgcaatattataaaaggtagaagcaaaacactagcacattgtgctttgcttggcttgtaaggatggctttagtaccattacattaaatggacagtgtgcacagtgtattgtaaatgccaactcttgcaaatttacaatacttaaatatgttcaattaacatcctaaagtattaaaagtacagaggaaaaactaagcaagcatttatagcaataccatgaaatctccagtaatcgttttgactgttgccttttgctctttagtgcagcttttctgcattgtaattgtattgctttgtatttcatgttttttacactcatgacttcagagttaagtacttgtacaccaagtattgcaatcacctttctcttgttgtacatgcaatgtaacaacctacagttttggtgcttttaacaatattcctctttttctttaataaaggatatttatttgaattaattaaaaaaaaaaaaaaaaaa

SEQ ID NO: 242 - DNA, 2523 bp, Homo sapiens
agcctgaaggactgcttgcctgtgaggagggtcactcttgactggctgcatcaggaccatgtgtgaccagcagcagatccagtgccgcctgccgctccaacagtgctgcgtcaagggtccctccttctgctcctctcaatccccctttgcccagagccaagtggtggttcaagccccttgtgagatgcaaattgtggactgccctgcatcatgcccagttcaagtttgccaggtgtcagaccaggctccatgccagtctcagaccacacaggtgaagtgccagtctaagaccaagcaggtgaagggccaggctcaatgtcagtctaagaccacccaggtgaagggccaggctgcatcccaatctcaaacttcctctgttcaaagccaggctccatgccaatctgaggtgtcctacgtgcagtgcgaagcgtcacaacctgttcagacttgcttcgtagaatgtgctccagtttgttatacagaaacttgttatgtagaatgcccagtccagaactatgtaccctgtccagctcctcagcctgtccagatgtatagagggcgtcctgcagtgtgccagcctcagggaagattctccacccagtgccagtatcaaggctcctatagcagttgtggcccccagtttcagtcaagggctacctgcaacaactacaccccccagttccagttgaggccttcctacagcagctgtttccctcagtatcggtcccggacttcatttagtccctgtgtgccccagtgccagacccagggctcctatgggagcttcactgaacagcaccgctctcggagcaccagcagatgccttcctcctcctcggcggctgcagcttttcccccgcagctgttccccaccaagacgttttgagccctgctccagcagctacctgccactaagaccctctgaaggtttccctaactactgcaccccaccccgccgctctgaacccatatataacagtcgctgtcctcgccgccccatttcaagctgctctcagagacgtggccccaagtgccgaatcgagatttcctccccgtgctgccccaggcaggttcccccacagaggtgtcctgttgagattcctcccatcagacgccgctcccagagctgtggcccgcagccctcctggggcgcctcctgccctgagctgaggccacacgtagagccacgtccactcccaagcttctgtccaccacggcgtcttgaccagtgtccagagtcaccactgcagcgatgtccacctcctgctccacgtccacgtctgcgcccagaaccatgcataagtctagaaccacgcccgcgtcctctaccacgacaactttcagaaccttgtttgtatccagaaccacttccagcactacgtccaacaccgcggccagttccccttcctcgcccagggcagtgtgagattccagagccacgtccatgcctgcagccctgtgagcacccagagccttgtccacgaccagagccaattcccctgccggcgccctgcccaagcccggagccctgcagggagacttggcgcagccccagcccatgctggggcccaaatccagttccatacccaggagacctaggctgtcatgagtctagtccacaccgcctagacaccgaagctccctactgtggcccatccagttacaaccaggggcaagagagtggtgctggctgtgggcctggtgatgtgtttccagagcggaggggtcaggatggccatggagaccaaggcaatgcctttgctggagtgaaaggggaagcaaagagtgcttatttttaaaggaaaggtgactgagataaccctctctcctgctctgaaaatgttgttcctcctattccacaatttccagtacgctcttgtttgaatctctccaaagatattcagagactccctattacgaaggtgatgtccaaactcctttgcctatcatccaaagatccacacctgggtctcagatgcctctccagcctcacgtgtcactcctcgcccgtacgcatcctcggctctagccagaccagtctggccactgggcacagcttgggtgttccccaggccatactttagatgtccctgcctccaagcctctgctcactcttccccactctgcctggaccacttctctcctcctccccagcttctgaaatccaccccatctttcagtgcctctcccttggagccttctttgcttgttcccactcacaagaacctgtgccgacttcctagaactcactgcatcccccgcactacttggtaactgcctggtgacatctcttgaattgttatttcactttgcaggcatgtcttccttatctgcccaactaggttgtaaactcccaactgagtggagtcggagaatctctaaatctcagtgtctatcctggggctggctgttgcttagcaaggcttgtgggttggcagcttgaaccatgttctgtcctgatgctcaactgcaggaactgaggtgagaggaggccatgtgacaataaagatcattatgtactcac

SEQ ID NO: 243 - DNA, 1193 bp, Homo sapiens
cagaaactcctccaagcaacctaactcttaacccaacttctgacaccatgacctgctgccagaccagcttctgtggatatcccagcttctccatcagtgggacctgtggctccagctgctgccagccaagctgctgtgagaccagctgctgccagccacgcagctgccagactagcttctgcggatttcccagcttctcaaccagtgggacctgcagctccagttgctgccagccaagctgctgtgagaccagctgctgccagccaagctgctgtgagaccagctgctgccagccaagctgctgccagatcagctcctgcggaactggctgtggcattggtggtggcatcagctatggccaggagggcagcagtggagctgtgagcacccgtatcaggtggtgccgcccagacagtcgtgtggagggcacctacctacccccctgctgtgtggtgagctgcacgcccccatcctgctgccaactgcaccatgcccaggcctcctgctgccgcccgtcctactgtggacagtcctgctgccgcccagtctgctgctgtgagcccacttgctgaaagccagtttgcttattttcaattgcctaggtcacagtgtctctgaactgttcatcccttgaccacctctggaccactaacaagttctcagactttgcattgcttgtgatggagactactaagtatatgagctcacaattctatctgattccattctacaatgaataccttgacccttcactggggacacagaaatgctacaaagccacctgctgatcatcaatttgcttgggatatactatttctgatatttctgcaggattaaaaattactgacatgttgtggaatttatccatgagaactatccacaagtctaatgtttccatgctttataatctattttatcttgtttacctaaaattttttgcaacatcaaagacaccaaattatagccaagtgacattcctcaagtcaccagagagaatggaagctcatcacccaacattcagcttctaagaagtaggctggactttccacattttaacatctgatccatcccttggtttttggatcataatgatcttgcctgctggatatttcagttatatctgtgatacaatgtcttctgtcatttcttaataaatattatatactaggcaaagaaaaaaaaaaaaaaaaaaa

SEQ ID NO: 244 - DNA, 3987 bp, Homo sapiens
cttcctggactggggatcccggctaaatatagctgtttctgtcttacaacacaggctccagtatataaatcaggcaaattccccatttgagcatgaacctctgaaaactgccggcatctgaggtttcctccaaggccctctgaagtgcagcccataatgaaggtcttggcggcaggagttgtgcccctgctgttggttctgcactggaaacatggggcggggagccccctccccatcacccctgtcaacgccacctgtgccatacgccacccatgtcacaacaacctcatgaaccagatcaggagccaactggcacagctcaatggcagtgccaatgccctctttattctctattacacagcccagggggagccgttccccaacaacctggacaagctatgtggccccaacgtgacggacttcccgcccttccacgccaacggcacggagaaggccaagctggtggagctgtaccgcatagtcgtgtaccttggcacctccctgggcaacatcacccgggaccagaagatcctcaaccccagtgccctcagcctccacagcaagctcaacgccaccgccgacatcctgcgaggcctccttagcaacgtgctgtgccgcctgtgcagcaagtaccacgtgggccatgtggacgtgacctacggccctgacacctcgggtaaggatgtcttccagaagaagaagctgggctgtcaactcctggggaagtataagcagatcatcgccgtgttggcccaggccttctagcaggaggtcttgaagtgtgctgtgaaccgagggatctcaggagttgggtccagatgtgggggcctgtccaagggtggctggggcccagggcatcgctaaacccaaatgggggctgctggcagaccccgagggtgcctggccagtccactccactctgggctgggctgtgatgaagctgagcagagtggaaacttccatagggagggagctagaagaaggtgccccttcctctgggagattgtggactggggagcgtgggctggacttctgcctctacttgtccctttggccccttgctcactttgtgcagtgaacaaactacacaagtcatctacaagagccctgaccacagggtgagacagcagggcccaggggagtggaccagcccccagcaaattatcaccatctgtgcctttgctgccccttaggttgggacttaggtgggccagaggggctaggatcccaaaggactccttgtcccctagaagtttgatgagtggaagatagagaggggcctctgggatggaaggctgtcttcttttgaggatgatcagagaacttgggcataggaacaatctggcagaagtttccagaaggaggtcacttggcattcaggctcttggggaggcagagaagccaccttcaggcctgggaaggaagacactgggaggaggagaggcctggaaagctttggtaggttcttcgttctcttccccgtgatcttccctgcagcctgggatggccagggtctgatggctggacctgcagcaggggtttgtggaggtgggtagggcaggggcaggttgctaagtcaggtgcagaggttctgagggacccaggctcttcctctgggtaaaggtctgtaagaaggggctggggtagctcagagtagcagctcacatctgaggccctgggaggccttgtgaggtcacacagaggtacttgagggggactggaggccgtctctggtccccagggcaagggaacagcagaacttagggtcagggtctcagggaaccctgagctccaagcgtgctgtgcgtctgacctggcatgatttctatttattatgatatcctatttatattaacttattggtgctttcagtggccaagttaattcccctttccctggtccctactcaacaaaatatgatgatggctcccgacacaagcgccagggccagggcttagcagggcctggtctggaagtcgacaatgttacaagtggaataagccttacgggtgaagctcagagaagggtcggatctgagagaatggggaggcctgagtgggagtggggggccttgctccacccccccccatcccctactgtgacttgctttagggtgtcagggtccaggctgcaggggctgggccaatttgtggagaggccgggtgcctttctgtcttgattccagggggctggttcacactgttcttgggcgccccagcattgtgttgtgaggcgcactgttcctggcagatattgtgccccctggagcagtgggcaagacagtccttgtggcccaccctgtccttgtttctgtgtccccatgctgcctctgaaatagcgccctggaacaaccctgcccctgcacccagcatgctccgacacagcagggaagctcctcctgtggcccggacacccatagacggtgcggggggcctggctgggccagaccccaggaaggtggggtagactggggggatcagctgcccattgctcccaagaggaggagagggaggctgcagatgcctgggactcagaccaggaagctgtgggccctcctgctccacccccatcccactcccacccatgtctgggctcccaggcagggaacccgatctcttcctttgtgctggggccaggcgagtggagaaacgccctccagtctgagagcaggggagggaaggaggcagcagagttggggcagctgctcagagcagtgttctggcttcttctcaaaccctgagcgggctgccggcctccaagttcctccgacaagatgatggtactaattatggtacttttcactcactttgcacctttccctgtcgctctctaagcactttacctggatggcgcgtgggcagtgtgcaggcaggtcctgaggcctggggttggggtggagggtgcggcccggagttgtccatctgtccatcccaacagcaagacgaggatgtggctgttgagatgtgggccacactcacccttgtccaggatgcagggactgccttctccttcctgcttcatccggcttagcttggggctggctgcattcccccaggatgggcttcgagaaagacaaacttgtctggaaaccagagttgctgattccacccggggggcccggctgactcgcccatcacctcatctccctgtggacttgggagctctgtgccaggcccaccttgcggccctggctctgagtcgctctcccacccagcctggacttggccccatgggacccatcctcagtgctccctccagatcccgtccggcagcttggcgtccaccctgcacagcatcactgaatcacagagcctttgcgtgaaacagctctgccaggccgggagctgggtttctcttccctttttatctgctggtgtggaccacacctgggcctggccggaggaagagagagtttaccaagagagatgtctccgggcccttatttattatttaaacatttttttaaaaagcactgctagtttacttgtctctcctccccatcgtccccatcgtcctccttgtccctgacttggggcacttccaccctgacccagccagtccagctctgccttgccggctctccagagtagacatagtgtgtggggttggagctctggcacccggggaggtagcatttccctgcagatggtacagatgttcctgccttagagtcatctctagttccccacctcaatcccggcatccagccttcagtcccgcccacgtgctagctccgtgggcccaccgtgcggccttagaggtttccctccttcctttccactgaaaagcacatggccttgggtgacaaattcctctttgatgaatgtaccctgtggggatgtttcatactgacagattatttttatttattcaatgtcatatttaaaatatttattttttataccaaatgaatacttttttttttaagaaaaaaaagagaaatgaataaagaatctactcttggctggcaaaaaaaaaaaaaaaaaa

SEQ ID NO: 245 - DNA, 7253 bp, Homo sapiens
ggaaagaagtggaataattaggaacctagggtggggtagggtagcaggacatttcaaacattaatgagcatatgagattccaggtcttgttaaaatgcaaattctgattcagctggtaggtgaggtctgagattgtgcatttctaacaagcactcagataatcttaaggctgttggccccagggtcacacttatagtgattttctagaacccagttggggaagtgaatcttgggcaggagaaatacacacctcttgcattgagtttggagatctcatctgatataactttttaagaaagaaaaataattttccaaatatccaattgataagctttcccactaagtggctttcccactaagtggctgcgttatgaaaattgcttcactttgaaacttctggtcttggtaatatagaatttctgtgttctcacagtgcttgattgagaatatgatattgagattatggcataaaatatagtggctgtacaaaaaaaaatacattattaggatctctaacaattatgtaaaagtcattgcttcatgggtagagctcaaactttggtgtgagacctggttttattcttggcacttactctgagttgtcttaggcaaattaataccttaagcaaaaatattctcatgtacattttacatgagaattataaatgaagtacataaagtccagcagtcacaaatgttatctattattaccatcgtcctaagactgcaatcagctatagtgaaagtagtctcaaagattgtttcataaatcatcagattcacctaattttctaaagaatttaaataaggagatggaatgaatagattgcattttgtttccatgcacaggggaactgtgcatatttcttctgtgactcggaaatggtttaacttttaaaaatcccaaaatagctgaagttagcagacatgcaatttaccaaggatgattggaatttttatctttcctgtaataatactatacccaagcacactgctcatgaggaaaacatttttatgtgaatcttttactcttgggggcaaagaatgctgtttttctttttgataactatgtttatagaatctaaatcaccctgagcaattatttcaacatctaaagttattattaccattcatgtttcatttatagctatttgaattttgatgaatttcaatatggtgctacagtgatagggcaagtgcaaataagttcaatatatgggtacggtctaaagctattttaatttttttattacaactgctatgaagaaaattaggatatgccatattttcacgttttacagttggatgtcctatgatgttctcttccagagaacagagctcggagctctggaaatttggaggcaactgatatgtgctcatgtctgcatctgtgtgggttggctgtatctcagggacagagtctgcagcaaaaaagatataattttgaggactgaacaaaattcaggaaggactattctcattaaggcagtaacagagaagaattttgaaacaaaagattttcgagcctctctagaaaatggtgttctgctgtgtgatttgattaataagcttaaacctggcgtcattaagaagatcaatagactgtctacaccaatagcaggattggataatataaacgttttcttgaaagcttgtgaacagattggattgaaagaagcccagcttttccatcctggagatctacaggatttatcaaatcgagtcactgtcaagcaagaagagactgacaggagagtgaaaaatgttttgataacattgtactggctgggaagaaaagcacaaagcaacccgtactataatggtccccatcttaatttgaaagcgtttgagaatcttttaggacaagcactgacgaaggcactcgaagactccagcttcctgaaaagaagtggcagggacagtggctacggtgacatctggtgtcctgaacgtggagaatttcttgctcctccaaggcaccataagagagaagattcctttgaaagcttggactctttgggctcgaggtcattgacaagctgctcctctgatatcacgttgagaggggggcgtgaaggttttgaaagtgacacagattcggaatttacatttaagatgcaggattataataaagatgatatgtcgtatcgaaggatttcggctgttgagccaaagactgcgttacccttcaatcgttttttacccaacaaaagtagacagccatcctatgtaccagcacctctgagaaagaaaaagccagacaaacatgaggataacagaagaagttgggcaagcccggtttatacagaagcagatggaacattttcaagactctttcaaaagatttatggtgagaatgggagtaagtccatgagtgatgtcagcgcagaagatgttcaaaacttgcgtcagctgcgttacgaggagatgcagaaaataaaatcacaattaaaagaacaagatcagaaatggcaggatgaccttgcaaaatggaaagatcgtcgaaaaagttacacttcagatctgcagaagaaaaaagaagagagagaagaaattgaaaagcaggcacttgagaagtctaagagaagctctaagacgtttaaggaaatgctgcaggacagggaatcccaaaatcaaaagtctacagttccgtcaagaaggagaatgtattcttttgatgatgtgctggaggaaggaaagcgaccccctacaatgactgtgtcagaagcaagttaccagagtgagagagtagaagagaagggagcaacttatccttcagaaattcccaaagaagattctaccacttttgcaaaaagagaggaccgtgtaacaactgaaattcagcttccttctcaaagtcctgtggaagaacaaagcccagcctctttgtcttctctgcgttcacggagcacacaaatggaatcaactcgtgtttcagcttctctccccagaagttaccggaaaactgatacagtcaggttaacatctgtggtcacaccaagaccctttggctctcagacaaggggaatctcatcactccccagatcttacacgatggatgatgcttggaagtataatggagatgttgaagacattaagagaactccaaacaatgtggtcagcacccctgcaccaagcccggacgcaagccaactggcttcaagcttatctagccagaaagaggtagcagcaacagaagaagatgtgacaaggctgccctctcctacatcccccttctcatctctttcccaagaccaggctgccacttctaaagccacattgtcttccacatctggtcttgatttaatgtctgaatctggagaaggggaaatctccccacaaagagaagtctcaagatcccaggatcagttcagtgatatgagaatcagcataaaccagacgcctgggaagagtcttgactttgggtttacaataaaatgggatattcctgggatcttcgtagcatcagttgaagcaggtagcccagcagaattttctcagctacaagtagatgatgaaattattgctattaacaacaccaagttttcatataacgattcaaaagagtgggaggaagccatggctaaggctcaagaaactggacacctagtgatggatgtgaggcgctatggaaaggctggttcacctgaaacaaagtggattgatgcaacttctggaatttacaactcagaaaaatcttcaaatctatctgtaacaactgatttctccgaaagccttcagagttctaatattgaatccaaagaaatcaatggaattcatgatgaaagcaatgcttttgaatcaaaagcatctgaatccatttctttgaaaaacttaaaaaggcgatcacaattttttgaacaaggaagctctgattcggtggttcctgatcttccagttccaaccatcagtgccccgagtcgctgggtgtgggatcaagaggaggagcggaagcggcaggagaggtggcagaaggagcaggaccgcctactgcaggaaaaatatcaacgtgagcaggagaaactgagggaagagtggcaaagggccaaacaggaggcagagagagagaattccaagtacttggatgaggaactgatggtcctaagctcaaacagcatgtctctgaccacacgggagccctctcttgccacctgggaagctacctggagtgaagggtccaagtcttcagacagagaaggaacccgagcaggagaagaggagaggagacagccacaagaggaagttgttcatgaggaccaaggaaagaagccgcaggatcagcttgttattgagagagagaggaaatgggagcaacagcttcaggaagagcaagagcaaaagcggcttcaggctgaggctgaggagcagaagcgtcctgcggaggagcagaagcgccaggcagagatagagcgggaaacatcagtcagaatataccagtacaggaggcctgttgattcctatgatataccaaagacagaagaagcatcttcaggttttcttcctggtgacaggaataaatccagatctactactgaactggatgattactccacaaataaaaatggaaacaataaatatttagaccaaattgggaacatgacctcttcacagaggagatccaagaaagaacaagtaccatcaggagcagaattggagaggcaacaaatccttcaggaaatgaggaagagaacaccccttcacaatgacaacagctggatccgacagcgcagtgccagtgtcaacaaagagcctgttagtcttcctgggatcatgagaagaggcgaatctttagataacctggactccccccgatccaattcttggagacagcctccttggctcaatcagcccacaggattctatgcttcttcctctgtgcaagactttagtcgcccaccacctcagctggtgtccacatcaaaccgtgcctacatgcggaacccctcctccagcgtgcccccaccttcagctggctccgtgaagacctccaccacaggtgtggccaccacacagtcccccaccccgagaagccattccccttcagcttcacagtcaggctctcagctgcgtaacaggtcagtcagtgggaagcgcatatgctcctactgcaataacattctgggcaaaggagccgccatgatcatcgagtccctgggtctttgttatcatttgcattgttttaagtgtgttgcctgtgagtgtgacctcggaggctcttcctcaggagctgaagtcaggatcagaaaccaccaactgtactgcaacgactgctatctcagattcaaatctggacggccaaccgccatgtgatgtaagcctccatacgaaagcactgttgcagatagaagaagaggtggttgctgctcatgtagatctataaatatgtgttgtatgtcttttttgctttttttttaaaaaaaagaataactttttttgcctctttagattacatagaagcattgtagtcttggtagaaccagtatttttgttgtttatttataaggtaattgtgtgtggggaaaagtgcagtatttacctgttgaattcagcatcttgagagcacaagggaaaaaataagaacctacgaatatttttgaggcagataatgatctagtttgactttctagttagtggtgttttgaagagggtattttattgttttttaaaaaaaggttcttaaacattatttgaaatagttaatataaatacataattgcatttgctctgtttattgtaatgtattctaaattaatgcagaaccatatggaaaatttcattaaaatctatccccaaatgtgctttctgtatccttccttctacctattattctgatttttaaaaatgcagttaatgtaccatttatttgcttgatgaagggagctctattttctttaccagaaatgttgctaagtaattcccaatagaaagctgcttattttcattaatgaaaaataaccatggtttgtatactagaagtcttcttcagaaactggtgagcctttctgttcaattgcatttgtaaataaacttgctgatgcatttaacgagtgggtcgtctttttcttaggtgtatgtgtctgacctcaggccttttagccatatttcagtatgtggccttttttgatgttatgttttatccagtagctttactaaggtataattgatgtaataaactgcatatatttaaagtgtatactttgacaaattttgacatggtgtataccttcgaaactatgccacagtctggatgtgtttactgaaacattttaataaggaagtttatttttgataaagttatgtttttggatacaatatatttgtatggtgagagtgatgaattgttggatcatttgaataaaatcttttactaaccccatgataaaaggagaagacaacagtgagcttagaatatctataaagcaaaaaatgtagtctcttgtttaaaaaatctggagcgggaatgcaaggatacaaaactttagcatgctttgagcaaaaatttaaacttactggaatcttttataataatgtaagtggaatggaggattctaggaactgagaactgtattggaataggttcaaaatatgtaagaaatgctaatgtgggagataaaaattttatttagtacttattctgattattattaaagtaataatgtgttccttgaggataacttgtcaaatgccccaaagcataaagaatataattctgaatcccaaattccaaagacaagaactctgtgtttgaattcattctgcatataattatttataagtatagattgtgaatttttccatgttcttaaaattatttttatcttttttcatggttgcatagtgctccattgtttggccttggtaatatttagttgataattccattactgtgtatttttcacttgtttctaagatcaaacattttaatatgtgcatgttatatataaatatgtaaattctgtgatactctatgatcatctctttctttatattattttcatagacatgaaatagttgctcagagattatgcattttaagacactcatagtatatattgccaaagtggtttccagaaaggcactgctggcttcgactcctataagcagcacgtgggcttgttcatctcactgcatgtttatgaagatacagttcttttgccttgttctctgcctgatgtgtatgcagaggcagccctcaatatgcagtggttgaataaatgaatgaagaaaccactatcaaaaaaaaaaaaaaaaaa

SEQ ID NO: 246 - DNA, 2319 bp, Homo sapiens
gcaggggcggggcctgagtcagcgcagttcggccggggtctccccggcgctgcccagtctgtctccggcgccgcccgtcgcggactcgtccttgctgcagtcgccgccgcagtcctcgccgcagtcgccgccgccgccgccgccgccgccgctgctcctccgcctggcctgggccgtctgcccgcagccatgagcgtgctcggccccggtggagcccgcagtcctctagattagtctccaccgccgtccaggacccacttgcagcatggagtcgcccgcctcgagccagcccgccagcatgccccagtccaaaggaaaatccaagaggaagaaggatctacggatatcctgcatgtccaagccacccgcacccaaccccacacccccccggaacctggactcccggaccttcatcaccattggagacagaaactttgaggtggaggctgatgacttggtgaccatctcagaactgggccgtggagcctatggggtggtagagaaggtgcggcacgcccagagcggcaccatcatggccgtgaagcggatccgggccaccgtgaactcacaggagcagaagcggctgctcatggacctggacatcaacatgcgcacggtcgactgtttctacactgtcaccttctacggggcactattcagagagggagacgtgtggatctgcatggagctcatggacacatccttggacaagttctaccggaaggtgctggataaaaacatgacaattccagaggacatccttggggagattgctgtgtctatcgtgcgggccctggagcatctgcacagcaagctgtcggtgatccacagagatgtgaagccctccaatgtccttatcaacaaggagggccatgtgaagatgtgtgactttggcatcagtggctacttggtggactctgtggccaagacgatggatgccggctgcaagccctacatggcccctgagaggatcaacccagagctgaaccagaagggctacaatgtcaagtccgacgtctggagcctgggcatcaccatgattgagatggccatcctgcggttcccttacgagtcctgggggaccccgttccagcagctgaagcaggtggtggaggagccgtccccccagctcccagccgaccgtttctcccccgagtttgtggacttcactgctcagtgcctgaggaagaaccccgcagagcgtatgagctacctggagctgatggagcaccccttcttcaccttgcacaaaaccaagaagacggacattgctgccttcgtgaaggagatcctgggagaagactcataggggctgggcctcggaccccactccggccctccagagccccacagccccatctgcgggggcagtgctcacccacaccataagctactgccatcctggcccagggcatctgggaggaaccgagggggctgctcccacctggctctgtggcgagccatttgtcccaagtgccaaagaagcagaccattggggctcccagccaggcccttgtcggccccaccagtgcctctccctgctgctcctaggacccgtctccagctgctgagatcctggactgagggggcctggatgccccctgtggatgctgctgcccctgcacagcaggctgccagtgcctgggtggatgggccaccgccttgcccagcctggatgccatccaagttgtatatttttttaatctctcgactgaatggactttgcacactttggcccagggtggccacacctctatcccggctttggtgcggggtacacaagaggggatgagttgtgtgaataccccaagactcccatgagggagatgccatgagccgcccaaggccttcccctggcactggcaaacagggcctctgcggagcacactggctcacccagtcctgcccgccaccgttatcggtgtcattcacctttcgtgttttttttaatttatcctctgttgattttttcttttgctttatgggtttggcttgtttttcttgcatggtttggagctgatcgcttctcccccaccccctagggtaccagcaggcagagccttgccctctgctcaggctggggtccagtgggaggggcccaagatctctgctcagagaagtgcagggggagccttccagctcactctccctgaggactggcttgacaggggctatgggtttgctttggtgttgtttttaaaaaaagaaaatatatttttttgaaaaaacgactgcccatcccgggtcctttccctgatgggttggggcagttacctggttgctgttttaattaaaaaaaaaaaaaaaaaaaggactaaa

SEQ ID NO: 247 - DNA, 1360 bp, Homo sapiens
gtcggcgcggcgaaagcagagcggcgcgccggttccttggttcctgagggcgatggcgcggggtggctggcgccggctacgccgcctgttatccgcggggcagcttctattccagggccgcgcgctgctcgtcactaacacgctgggctgcggcgcgctcatggcggccggtgatggcgtgcgccagtcctgggagatccgcgcccggcccggccaggttttcgacccacggcgctccgcgagcatgtttgcggtgggctgcagcatgggtcccttcctgcactactggtacttgtcgctggaccgcctattccctgcgtctggcctccgaggcttcccaaatgtcctcaagaaggtcctcgtggatcagctggtagcctctccattgctgggcgtctggtacttcttgggccttggctgcctggagggtcagacagtgggtgagagctgccaggagctgcgggagaagttctgggaattctacaaggcagactggtgcgtgtggcctgctgcgcagttcgtgaacttcctcttcgtgcccccccaatttcgagtcacctacatcaacggcctgacgctgggctgggacacgtacctgtcctacttgaagtaccggagcccagttcctctgacacccccaggctgtgtggccctggacacccgagcagactgaactgtctgcttcctggaccagatgcaagactgtctcctggcggaccaccccctctgacagaaggggaatgggctcctgcagcaagctcgggtcttgagccacgtcccagcaccacttcagctccggagcattgggctgagccgccctttccaagctcacttctgggactgagtttcctcaaccggaacacacccatgaagatggatgatcatcccctagcccttctcagcaggaacctcatgcgacctgtgaccaagatgtcccatcctcagcacagggcccactctgccaaccagtctcaagcaccagcccctcaacactgccatccacctggctctgggccaagccaccaatccagagctccctcaggtcctgggactaaggcggggacatgactgatcccctcagagcaggctcaggcctggagtcggcccccaaaagtttcacatagggccaggcagcctctgtgtttctttccctggtcctgaactgtggaaatgccattaaactctctctataatgtaactgaaactgctggctgggcgcagtggctcccacctgtaatctcagcccttcccgaggctgaggtggaaggattgctcgaggccaggtgttcgagaccagcctgggcaacatagcaagaccctgtctctatttatattgaaaaataaaaataacaaaagaaaa

SEQ ID NO: 248 - DNA, 3379 bp, Homo sapiens
attccagatgcctgggccgactcgaagcccttataaggcgcggagacaccggctctggctgggccgcccgcctccacagccgccgcccagggttctcccgccactgccgcccgcacccccgcccccgcggggttaagatcacacacgcgcccacgccggcccgcggggcgtgcactttcgctgggttccgtccgccgcagcccaaacagttaactgaacggggaggggagggggcggggcttacccggggtcaccgccagggccctgctgggttccacgccacgttcctgtctccgcagggcgttcgatccctagagggaggagcctgtccaaacggacgctaacggcctacctccccctcaggtgctcttacagcctgttccaagtgtggcttaatccgtctccaccaccagatctttctccgtggattcctctgctaagaccgctgccatgccagtgacggtaacccgcaccaccatcacaaccaccacgacgtcatcttcgggcctggggtcccccatgatcgtggggtcccctcgggccctgacacagcccctgggtctccttcgcctgctgcagctggtgtctacctgcgtggccttctcgctggtggctagcgtgggcgcctggacggggtccatgggcaactggtccatgttcacctggtgcttctgcttctccgtgaccctgatcatcctcatcgtggagctgtgcgggctccaggcccgcttccccctgtcttggcgcaacttccccatcaccttcgcctgctatgcggccctcttctgcctctcggcctccatcatctaccccaccacctatgtccagttcctgtcccacggccgttcgcgggaccacgccatcgccgccaccttcttctcctgcatcgcgtgtgtggcttacgccaccgaagtggcctggacccgggcccggcccggcgagatcactggctatatggccaccgtacccgggctgctgaaggtgctggagaccttcgttgcctgcatcatcttcgcgttcatcagcgaccccaacctgtaccagcaccagccggccctggagtggtgcgtggcggtgtacgccatctgcttcatcctagcggccatcgccatcctgctgaacctgggggagtgcaccaacgtgctacccatccccttccccagcttcctgtcggggctggccttgctgtctgtcctcctctatgccaccgcccttgttctctggcccctctaccagttcgatgagaagtatggcggccagcctcggcgctcgagagatgtaagctgcagccgcagccatgcctactacgtgtgtgcctgggaccgccgactggctgtggccatcctgacggccatcaacctactggcgtatgtggctgacctggtgcactctgcccacctggtttttgtcaaggtctaagactctcccaagaggctcccgttccctctccaacctctttgttcttcttgcccgagttttctttatggagtacttctttcctccgcctttcctctgttttcctcttcctgtctcccctccctcccacctttttctttccttcccaattccttgcactctaaccagttcttggatgcatcttcttccttccctttcctcttgctgtttccttcctgtgttgttttgttgcccacatcctgttttcacccctgagctgtttctctttttcttttcttttttttttttttttttttttaagacggattctcactctgtggcccaggctggagtgcagtggtgcgatctcgactcactgcaacccccgcctcctgggttcaagcgattctcctgccccagcctcccaagtagctgggaggacaggtgtgagctgccgcacccagcctgtttctctttttccactcttcttttttctcatctcttttctgggttgcctgtcggctttcttatctgcctgttttgcaagcaccttctcctgtgtccttgggagccctgagacttctttctctccttgcctccacccacctccaaaggtgctgagctcacatccacaccccttgcagccgtccatgccacagccccccaaggggccccattgccaaagcatgcctgcccaccctcgctgtgccttagtcagtgtgtacgtgtgtgtgtgtgtgtgtgtgtgtgtgtgtgtttggggggtggggggtgggtagctggggattgggccctctttctcccagtggaggaaggtgtgcagtgtacttcccctttaaattaaaaaacatatatatatatatatttggaggtcagtaatttccaatgggcgggaggctttaagcaccgaccctgggtccctaggccccgcctggcactcagccttgccagagattggctccagaatttttgccaggcttacagaacacccactgcctagaggccatcttaaaggaagcaggggctggatgcctttcatcccaactattctctgtggtatcaaaaagaaaaaaaaaaaaaaagaaggagtcggggccgggcgtggtggctcacgcctgtaatcccagcactttgggagaccaagtcaggcaatcatctgaagtcaggagttcaagaccagcctggccaacatggtgaaagcatgtctctattaaaaatacaaaaattagccgggcgtggtggcgggcgcctgtaatcccaggtatttggggggactgagacaggagaatcccttcaacccgggaggtggaggttgcagtaagtcaagatggcaccactgtgctccagcctgggggacagagcgagactccatctcaaaaaaaaaaaggaatcggacgaagaaccacaggatgttgaagacaactgtctgaagtatttgtgagggacagcgatgtggccctctgtgttaagaataacgtgtcctgctttggcagagagaagaaaatagccactgcccgctttcaaggcaagatcgaccttttctgttttgttttgtttttctttctttttcctggccatgaggacaaaaattactgagtggcccttaaagagggaagtttgttttcagctgttctcttttgcccgtaggtgggagggtggggattgctgcgtcctagctagaggaatggctttgcttgaatgtgtagtgcacacgcacgggtgtttctgtgtgctagttgcttcttgctgctgcttcctgcttgtctgggactcacatacataacgtgatatatatatatatatatataaatgtataaatatatattttatttttttttaaatccctggagcttctggttcctatcagttcctgttgttaatcgtagaaccgttgtcccttcccccattcccgtatccatcatgttctttttcttttaaatatcaatataaaggtaaaagaaaaaaaaaaaaaaaaaaaaaaaaa

SEQ ID NO: 249 - DNA, 9774 bp, Homo sapiens
agatgcagggaagttttgcctcttcctgaaaattatattattagctttttaaaaatcaggatgactgctagttttgtttaaagtatttgttctggaaatactaaagttggagtctaccagactgaggttagaagcattttctttggcagcaagaagataattttatagaagccatgcctgttcttggggttgcctcaaaactgaggcagccagctgttgggtcaaagcctgtgcatactgctcttccgataccaaatcttggcactactgggtcacagcactgttcttcaagacctttggaacttactgaaacagagagctccatgctttcttgtcagcttgcgttaaaatcaacctgtgaatttggagagaagaaacccctccaaggaaaagccaaggagaaagaagacagcaagatttacactgactgggccaaccactacctagcaaaatcaggccacaagcggctgatcaaggacttgcaacaagacattgcagatggagtactcctagcagaaatcatccagattattgcaaatgaaaaagttgaagatatcaatggatgtcctagaagtcagtctcagatgattgaaaatgttgatgtctgccttagttttctagcagccagaggggtaaatgttcaaggtctatctgctgaagaaataagaaatggaaacttaaaagccattctagggctgtttttcagtttatctcgctacaagcagcaacaacaccatcaacaacagtactatcagtccttggtggaacttcagcagcgagttactcacgcttcccctccatcggaagccagccaggccaaaacccagcaagatatgcagtccagtctggcagccagatatgcaactcagtctaatcacagtggaattgcaaccagtcaaaaaaagcctactaggcttccagggccctctagggtgcctgctgcaggaagcagcagcaaggtccagggagcctctaatttaaataggagaagtcagagctttaacagcattgacaaaaacaagcctccaaattatgcaaatggaaacgaaaaagattcctccaaaggacctcaatcgtcttcaggtgtaaatggtaacgtgcagcctcccagtactgctgggcagcctcctgcctctgccatcccttctccaagtgccagcaagccctggcgcagcaagtccatgaatgtcaaacacagtgccacctccaccatgttgactgtaaagcagtcaagtacagccacctcccccacaccatcttcagacagactgaagccacctgtctcagaaggggtcaaaactgctccctcaggacagaaatccatgcttgagaaattcaagctagtcaatgcccggactgctttacgccccccgcagcctcccagttcaggacctagtgatggtgggaaggatgatgatgccttttctgaatctggtgaaatggaaggttttaacagtggtctgaatagtggtggctcaacaaatagcagtcccaaagtgtcacctaagttggcccctccaaaagctggaagcaaaaatctcagcaataaaaagtctttgctacagccaaaggaaaaagaagaaaagaacagggacaaaaataaagtttgcactgaaaaaccagtcaaagaagagaaggatcaggtgacagagatggctccaaaaaagacctccaaaattgcaagcttgatccctaagggcagcaagacaacagcagctaagaaggaaagcttaattccgtcttccagtggtattccaaaaccaggctctaaagttccaacagtaaagcaaaccatttcacctggcagcacagcaagcaaagagtctgagaaattcaggactaccaaggggagcccttcccagtccttatctaagcctataaccatggagaaagcaagtgcttctagttgtcctgcccctttggaaggaagggaagctggccaagcttctccttctggttcctgtaccatgacagtggcacaaagcagtgggcagagcacaggaaatggtgctgtccaactccctcaacagcagcaacatagccacccgaataccgcgacagtggcaccattcatttacagggcacattcagaaaatgaaggtaccgctttaccatcggctgactcctgtaccagtcctacaaagatggacttatcatatagtaagactgctaagcagtgcctggaggagatatctggtgaagaccctgaaacaagaagaatgagaacagttaaaaacatagcagacttgaggcagaatttagaagagactatgtccagtcttcgtgggactcagataagccacagcaccctggagacaacatttgacagcactgtgacaacagaagttaatggaaggaccatacccaacttgacaagtcgacccacccccatgacctggaggttgggccaggcatgtccgcgacttcaggcgggagatgctccctccctgggtgctggctatcctcgcagtggtaccagtcgattcatccacacagacccctcgaggttcatgtataccacgcctctccgtcgagctgctgtctctaggctgggaaacatgtcacagattgacatgagtgagaaagcaagcagtgacctggacatgtcttctgaggtcgatgtgggtggatatatgagtgatggtgatatccttgggaaaagtctcaggactgatgacatcaacagtgggtacatgacagatggaggacttaacctatatactagaagtctgaaccgaataccagacacagcaacttcccgggacatcatccagagaggggttcacgatgtgacagtggatgcagacagctgggatgacagcagttcagtgagcagtggtctcagtgacacccttgataacatcagcactgatgacctgaacaccacatcctctgtcagctcttactccaacatcaccgtcccctctaggaagaatactcagctgaggacagattcagagaaacgctccaccacagacgagacctgggatagtcctgaggaactgaaaaaaccagaagaagattttgacagccatggggatgctggtggcaagtggaagactgtgtcctctggacttcctgaagaccccgagaaggcagggcagaaagcttccctgtctgtttcacagacaggttcctggagaagaggcatgtctgcccaaggaggggcgccatctaggcagaaagctggaacaagtgcactcaaaacacccgggaaaaccgatgatgccaaagcttctgagaaaggaaaagctcccctaaaaggatcatctctacaaagatctccttcagatgcaggaaaaagcagtggagatgaagggaaaaagcccccctcaggcattggaagatcgactgccaccagctcctttggctttaagaaaccaagtggagtagggtcatctgccatgatcaccagcagtggagcaaccataacaagtggctctgcaacactgggtaaaattccaaaatctgctgccattggcgggaagtcaaatgcagggagaaaaaccagtttggacggttcacagaatcaggatgatgttgtgctgcatgttagctcaaagactaccctacaatatcgcagcttgccccgcccttcaaaatccagcaccagtggcattcctggccgaggaggccacagatccagtaccagcagtattgattccaacgtcagcagcaagtctgctggggccaccacctcgaaactgagagaaccaactaaaattgggtcagggcgctcgagtcctgtcaccgtcaaccaaacagacaaggaaaaggaaaaagtagcagtctcagattcagaaagtgtttctttgtcaggttcccccaaatccagccccacctctgccagcgcctgtggtgcacaaggtctcaggcagccaggatccaagtatccagatattgcctcacccacatttcgaaggttgtttggtgccaaggcaggtggcaaatctgcctctgcacctaatactgagggtgtgaaatcttcctcagtaatgcccagccctagtaccacattagcgcggcaaggcagtctggagtcaccgtcgtccggtacgggcagcatgggcagtgctggtgggctaagcggcagcagcagccctctcttcaataaaccctcagacttaactacagatgttataagcttaagtcactcgttggcctccagcccagcatcggttcactctttcacatcaggtggtctcgtgtgggctgccaatatgagcagttcctctgcaggcagcaaggatactccgagctaccagtccatgactagcctccacacgagctctgagtccattgacctccccctcagccatcatggctccttgtctggactgaccacaggcactcacgaggtccagagcctgctcatgagaacgggtagtgtgagatctactctctcagaaagcatgcagcttgacagaaatacactacccaaaaagggactaagatataccccatcatctcggcaggccaaccaagaagagggcaaagagtggttgcgttctcattctactggagggcttcaggacactggcaaccagtcacctctggtttccccttctgccatgtcatcttctgcagctggaaaataccacttttctaacttggtgagcccaacaaatttgtctcagtttaaccttcccgggcccagcatgatgcgctcaaacagcatcccagcccaagactcttccttcgatctctatgatgactcccagctttgtgggagtgccacttctctggaggaaagacctcgtgccatcagtcattcgggctcattcagagacagcatggaagaagttcatggctcttcattatcactggtgtccagcacttcttctctttactctacagctgaagaaaaggctcattcagagcaaatccataaactgcggagagagctggttgcatcacaagaaaaagttgctaccctcacatctcagctttcagcaaatgctcaccttgtagcagcttttgaaaagagcttagggaatatgactggccgattgcaaagtctaactatgacagcggaacaaaaggaatctgaacttatagaactaagagaaaccattgaaatgctgaaggctcagaattctgctgcccaggcggctattcagggagcactgaatggtccagaccatcctcccaaagatcttcgcatcagaagacagcattcctctgaaagtgtttctagtatcaacagtgccacaagccattccagtattggcagtggtaatgatgccgactccaagaagaagaaaaagaaaaactgggtgaactctagaggaagtgagctgagaagttctttcaaacaagcctttgggaagaaaaagtccaccaagcctccttcatcacattctgacattgaagagcttactgattcatcccttccggcatcccccaagttaccccataatgctggtgactgtggctcagcatccatgaagccctcacaatctgcttcagcgatctgtgaatgcacagaagctgaggcagagataattctgcagctgaagagcgagctcagagaaaaggaattaaaattaacggatattcggctggaggccctcagctctgctcatcatcttgatcagatccgggaagccatgaaccggatgcagaatgaaattgaaatactgaaagctgaaaatgaccggttgaaggcagaaactggtaacacagctaagcctactcggccaccgtcagaatcctcaagcagcacctcctcttcatcttccaggcagtcattaggactttctctaaacaatttgaacatcacagaggctgttagctcagatattttgctagatgatgctggtgatgcaactggacataaagatggccgcagtgtgaaaattatagtctccataagcaagggctatggtcgagcaaaggaccaaaaatctcaggcatatttgataggatccattggtgttagtggaaaaaccaagtgggatgtcttagatggtgtaataagacgtctctttaaggaatatgtattccgaattgatacatccactagccttggtctgagctctgactgcattgctagctactgtataggagacttaattagatcccataacctagaagtgcctgaattgctgccttgtggataccttgttggagataataacatcatcactgtgaacctcaaaggggtagaagaaaatagtttggacagttttgtttttgatacgctgattcctaaaccaattacccaaaggtactttaacttgttgatggagcatcacagaattatactctcaggaccgagtggtactggaaagacctatttggcaaacaaacttgctgaatatgtaataaccaaatctggaaggaaaaaaacagaggatgcaattgccacttttaatgtggaccacaagtcaagtaaggaattgcaacaatatctagctaacctggctgaacagtgcagtgctgataataatggagtggagctcccagttgtaataattcttgataatcttcatcatgtgggctctctgagtgatatcttcaatggttttctcaattgtaaatacaacaaatgtccatatattattggaacaatgaatcagggagtttcttcatcaccaaatctagagctgcatcacaatttcaggtgggtattatgtgcaaatcatacagaaccagtgaaaggctttttaggcagatatcttcgaagaaaactcatagagatagaaattgaaaggaacattcgcaataatgacctagtcaaaattatagattggattccgaagacgtggcatcatctcaacagttttttggaaacacacagttcttctgacgttaccattggtccccgactattccttccttgccccatggatgtagaaggttctagagtatggttcatggatctctggaactattctttagtaccttatattctggaggcagtgagagagggtcttcagatgtatgggaaacgcacaccatgggaagatccttcaaagtgggtgcttgacacatatccatggagctcagcaactctgcctcaggagagcccagccttacttcagctgcgaccagaagatgttgggtatgaaagctgcacatccactaaggaagccacaacctcaaagcacattccgcaaactgacacagaaggagatcccctgatgaatatgctaatgaaactccaagaagcagccaattactcgagcacacaaagctgcgacagcgaaagcaccagccaccatgaagacattttggattcatctcttgaatctaccctctagagggtgaaaaaagttaagggaaaagactttgcttttaaaaaaatgtttcaaaagaaaggtattttcactaaaccactgccagtataaaagcaccctgtcaagggccctgacccagagttgtggtctccaaggaggcagcagaactaagtctgaaccgccaagatgctaaattgcaatggaagcttaactttagtttatttctaagcattttttatatctgtggagtaatagaaagctccattactcaactggaaaggaccctaatgacagggcaactgaacagattgcacatgggatagccaaactggactttctttgtttcctctttaaaagtttacaatgcagaccattttttgtcccttccttttgtttcctctgaggggctgttcgccccaggcagggtccatctttctgatctgtccaacctcctttgtgccacacggtgctggtcacagggcttcagtagtgtttgtgttgtgcgctcaccccattccagaacaaatccaagaggccagtcctccataagcacaaatggaattgtgcaaccaccagaaaaacactactgtggcaaactggagaagtgccaatttaattctaactgccacgttctcatgatgtgctccaccaactttttagtatatgagtcactggttttataaggttgtttttaccacagtggtctttttaaaccacctgcccactcccttaacaagagttttataccaattattagtcaacactgataaaaggcttttttagggctttatttgtttgagccttttcagtgaaagaaggaacatttcctatggtgctgtctcactgccttaaaacagatttctatgacagtttaacagttggtttaaatcctaaaccattggtaatttccactgtcttttcatttacaaccaagcaacaccagttaacatagtagcctcatctctatatatctttctcttttttttttttttgaagaaatggataggagaaagatcagtatttttagccttgtgaatagatcgctttgcctatcctccaaaatattaaaataacccagaaatgctctttgaccgtcacttaaaacctaagacatgtggcgaaattccatccagttctaagtgaaagagtttcagaaggcagaagattttgaattattatccagcagggctggaagcactagatgcagcatgagcacaactattcggctttccttccctattgtttttgtttttttaatgagttttgacgcatgttgttttgattgctattgttgtacatgagaaattcagcattaaagaacactgaagcggtaaggtcactgtggaagaggaagcgtttatactgtaaaagaaggttagatttgcacagtctactgggtaggtattgtaaataataatttttaaaacttgcacaaatcaaaacaaacacaaacaaaattgtattttatcctgttggtgttaagaggtgtttcacttgctgagatttcctgtacattgcaaacaaatacagaatgcaaaccctcaaagctgtattatctggtgtgtttgtcctgtatttacagttgtttttgactatgcaggagctatcagtgctagagtgagcatgcttcaaaactgtacatgaagccaatatatttttggataagtaaaactgtctgaaagtacatctgtcatggcaggctttaaagagagtgcatgaaaactgatcagtcattggagaagttaccaccacacacaaaggacaggttttaagtttatgaaacccaagggctaggccatggtatagacttcttctatgagtgtgtgaaaatgtgttacttttaggacgtgtatttggtgctactctctgtgaccaccaatgggtcagttgctatagaacaacaacaccacgaaacatctgtgcagttttcagagtgtcacaaagtcaataggtccttacacggtgctattgccctaagggaaatccgaactgaatttatgcacatagaattgtcaccctgactttgaagcctcaaacatggatcaaatctgttgtgaaacatcaatatatgtagctggatgagtgactagtttcccttgtataatatgtgatctaagaaaattgctaatctttccctgccattttgagaaacacagtccaaacatgagcataaacagaatttcctgcaatacatcccagtaggtccacctagtttacaacttaaactagtttgtgaaacatttgtctgtatacattttatattttgtacattttgatgtaacatatcatgtaaataggcagaaacagtgaaataaatcatctgaaaagttttgtagtctttgtaaagccccaacaataagtacttggtgtcaatggacttaactggatgatgtattttctattggtttattgttcctctagcttgtaaaccagcttgcatatatttttttgcaaatgtgcaccctgtatctgtctaaattattactttgccattaaagtggaattatttattgacaacaaaaaaaaaaaaaaa

SEQ ID NO: 250 - DNA, 3126 bp, Homo sapiens
gcctcccgcccctcccgtcgcgagggcggggccagtggcgtcatttccaggcccgccccctccggccccgcctccccttggtattttcgggactttcctaagctgctctaactttcctgccccttccccggccaagcccaactccggatctcgctctccaccggatctcacccgccacacccggacaggcggctggaggaggcgggcgtctaaaattctgggaagcagaacctggccggagccactagacagagccgggcctagcccagagacatggagagttgctacaacccaggtctggatggtattattgaatatgatgatttcaaattgaactcctccattgtggaacccaaggagccagccccagaaacagctgatggcccctacctggtgatcgtggaacagcctaagcagagaggcttccgatttcgatatggctgtgaaggcccctcccatggaggactgcccggtgcctccagtgagaagggccgaaagacctatcccactgtcaagatctgtaactacgagggaccagccaagatcgaggtggacctggtaacacacagtgacccacctcgtgctcatgcccacagtctggtgggcaagcaatgctcggagctggggatctgcgccgtttctgtggggcccaaggacatgactgcccaatttaacaacctgggtgtcctgcatgtgactaagaagaacatgatggggactatgatacaaaaacttcagaggcagcggctccgctctaggccccagggccttacggaggccgagcagcgggagctggagcaagaggccaaagaactgaagaaggtgatggatctgagtatagtgcggctgcgcttctctgccttccttagagccagtgatggctccttctccctgcccctgaagccagtcatctcccagcccatccatgacagcaaatctccgggggcatcaaacctgaagatttctcgaatggacaagacagcaggctctgtgcggggtggagatgaagtttatctgctttgtgacaaggtgcagaaagatgacattgaggttcggttctatgaggatgatgagaatggatggcaggcctttggggacttctctcccacagatgtgcataaacagtatgccattgtgttccggacacccccctatcacaagatgaagattgagcggcctgtaacagtgtttctgcaactgaaacgcaagcgaggaggggacgtgtctgattccaaacagttcacctattaccctctggtggaagacaaggaagaggtgcagcggaagcggaggaaggccttgcccaccttctcccagcccttcgggggtggctcccacatgggtggaggctctgggggtgcagccgggggctacggaggagctggaggaggtggcagcctcggtttcttcccctcctccctggcctacagcccctaccagtccggcgcgggccccatgggctgctacccgggaggcgggggcggggcgcagatggccgccacggtgcccagcagggactccggggaggaagccgcggagccgagcgccccctccaggaccccccagtgcgagccgcaggccccggagatgctgcagcgagctcgagagtacaacgcgcgcctgttcggcctggcgcagcgcagcgcccgagccctactcgactacggcgtcaccgcggacgcgcgcgcgctgctggcgggacagcgccacctgctgacggcgcaggacgagaacggagacacaccactgcacctagccatcatccacgggcagaccagtgtcattgagcagatagtctatgtcatccaccacgcccaggacctcggcgttgtcaacctcaccaaccacctgcaccagacgcccctgcacctggcggtgatcacggggcagacgagtgtggtgagctttctgctgcgggtaggtgcagacccagctctgctggatcggcatggagactcagccatgcatctggcgctgcgggcaggcgctggtgctcctgagctgctgcgtgcactgcttcagagtggagctcctgctgtgccccagctgttgcatatgcctgactttgagggactgtatccagtacacctggcggtccgagcccgaagccctgagtgcctggatctgctggtggacagtggggctgaagtggaggccacagagcggcaggggggacgaacagccttgcatctagccacagagatggaggagctggggttggtcacccatctggtcaccaagctccgggccaacgtgaacgctcgcacctttgcgggaaacacacccctgcacctggcagctggactggggtacccgaccctcacccgcctccttctgaaggctggtgctgacatccatgctgaaaacgaggagcccctgtgcccactgccttcaccccctacctctgatagcgactcggactctgaagggcctgagaaggacacccgaagcagcttccggggccacacgcctcttgacctcacttgcagcaccaaggtgaagaccttgctgctaaatgctgctcagaacaccatggagccacccctgaccccgcccagcccagcagggccgggactgtcacttggtgatacagctctgcagaacctggagcagctgctagacgggccagaagcccagggcagctgggcagagctggcagagcgtctggggctgcgcagcctggtagacacgtaccgacagacaacctcacccagtggcagcctcctgcgcagctacgagctggctggcggggacctggcaggtctactggaggccctgtctgacatgggcctagaggagggagtgaggctgctgaggggtccagaaacccgagacaagctgcccagcacagaggtgaaggaagacagtgcgtacgggagccagtcagtggagcaggaggcagagaagctgggcccaccccctgagccaccaggagggctctgccacgggcacccccagcctcaggtgcactgacctgctgcctgcccccagcccccttcccggaccccctgtacagcgtccccacctatttcaaatcttatttaacaccccacacccacccctcagttgggacaaataaaggattctcatgggaaggggaggacccctccttcccaacttatggca

SEQ ID NO: 251 - DNA, 3934 bp, Homo sapiens
gtactggcccgcgccgtccgcccgccgacagctccctgagccagcccgggaggcagccgcgcgcagcgagccggtggcgcaggtgtcggggtcctcgagcgcccagcctgggagcatgattgtggacaagctgctggacgacagccgcggcggagaggggctgcgggacgcggcgggcggctgcggcctcatgaccagcccgctcaacctgagctacttctacggcgcgtcgccgcccgccgccgccccgggcgcctgcgacgccagctgctcggtcttgggcccctcggcgcccggctcgcccggctccgactcctccgacttctcctctgcctcgtcggtgtcctcctgcggcgccgtggagtcccggtcgagaggcggcgcccgcgccgagcgccagccagttgagccccatatgggggttggcaggcagcagagaggcccctttcaaggtgttcgggtaaagaactcagtgaaggaactcctgttgcacatccgaagtcataaacagaaggcttctggccaagctgtggatgattttaagacacaaggtgtgaacatagaacagttcagagaattgaagaacacagtatcatacagtgggaaaaggaaagggcccgattcgttgtctgatggacctgcttgcaaaaggccagctctgttgcattcccaatttttgacaccacctcaaacaccaacgcccggggagagcatggaagatgttcatctcaatgaacccaaacaggagagcagtgctgatctgcttcagaacattatcaacattaagaatgaatgcagccccgtttccctgaacacagttcaagttagctggctgaaccccgtggtggtccctcagagctcccccgcagagcagtgtcaggacttccatggagggcaggtcttttctccacctcagaaatgccaaccattccaagtcaggggctcccaacaaatgatagaccaggcttccctgtaccagtattctccacagaaccagcatgtagagcagcagccacactacacccacaaaccaactctggaatacagtccttttcccatacctccccagtcccccgcttatgaaccaaacctctttgatggtccagaatcacagttttgcccaaaccaaagcttagtttcccttcttggtgatcaaagggaatctgagaatattgctaatcccatgcagacttcctccagtgttcagcagcaaaatgatgctcacttgcacagcttcagcatgatgcccagcagcgcctgtgaggccatggtggggcacgagatggcctctgactcttcaaacacttcactgccattctcaaacatgggaaatccaatgaacaccacacagttagggaaatcactttttcagtggcaggtggagcaggaagaaagcaaattggcaaatatttcccaagaccagtttctttcaaaggatgcagatggtgacacgttccttcatattgctgttgcccaagggagaagggcactttcctatgttcttgcaagaaagatgaatgcacttcacatgctggatattaaagagcacaatggacagagtgcctttcaggtggcagtggctgccaatcagcatctcattgtgcaggatctggtgaacatcggggcacaggtgaacaccacagactgctggggaagaacacctctgcatgtgtgtgctgagaagggccactcccaggtgcttcaggcgattcagaagggagcagtgggaagtaatcagtttgtggatcttgaggcaactaactatgatggcctgactccccttcactgtgcagtcatagcccacaatgctgtggtccatgaactccagagaaatcaacagcctcattcacctgaagttcaggagcttttactgaagaataagagtctggttgataccattaagtgcctaattcaaatgggagcagcggtggaagcgaaggatcgcaaaagtggccgcacagccctgcatttggcagctgaagaagcaaatctggaactcattcgcctctttttggagctgcccagttgcctgtcttttgtgaatgcaaaggcttacaatggcaacactgccctccatgttgctgccagcttgcagtatcggttgacacaattagatgctgtccgcctgttgatgaggaagggagcagacccaagtactcggaacttggagaacgaacagccagtgcatttggttcccgatggccctgtgggagaacagatccgacgtatcctgaagggaaagtccattcagcagagagctccaccgtattagctccattagcttggagcctggctagcaacactcactgtcagttaggcagtcctgatgtatctgtacatagaccatttgccttatattggcaaatgtaagttgtttctatgaaacaaacatatttagttcactattatatagtgggttatattaaaagaaaagaagaaaaatatctaatttctcttggcagatttgcatatttcatacccaggtatctgggatctagacatctgaatttgatctcaatggtaacattgccttcaattaacagtagcttttgagtaggaaaggactttgatttgtggcacaaaacattattaatatagctattgacagtttcaaagcaggtaaattgtaaatgtttctttaagaaaaagcatgtgaaaggaaaaaggtaaatacagcattgaggcttcatttggccttagtccctgggagttactggcgttggacaggcttcagtcattggactagatgaaaggtgtccatggttagaatttgatctttgcaaactgtatataattgttatttttgtccttaaaaatattgtacatacttggttgttaacatggtcatatttgaaatgtataagtccataaaatagaaaagaacaagtgaattgttgctatttaaaaaaattttacaattcttactaaggagtttttattgtgtaatcactaagtctttgtagataaagcagatggggagttacggagttgttcctttactggctgaaagatatattcgaattgtaaagatgctttttctcatgcattgaaattatacattatttgtagggaattgcatgcttttttttttttttctcccgagacagggtcttgctctggcgcccaggctggagtacagtggcatgatcttggctcacttcagccttgacttgggctcaagtgatcctcctacctgagccttctgagtaactggaactacaggtgtgcactcctcgcctggctaattttttattttttgtacaggcaggatcttgccaccttgcccaggctggtcttgaactcctgagctcatgccatctgcctgccttagtctcccaaaatgctgggattacaggagtgagccaccatgcccggctggcagttgcatggaagagaacacctctttatggcttaccctctagaatttctaatttatgtgttctgttgaaatttttgtttttttacctttattgaaacaacaaaaagtcagtattgaaacatatcttcctgttttctgttgtcaaatgatgataatgtgccatgatgttttatatatatcattcagaaaaagttttattttttaataacattctattaacattattttgcttgccgctggcatgcctgaggaatgtatttggctttgattacacactaagtttttgtaataaatttgactcattaaaaaccttttttttttaaaaaaaaaaaaaaagaaaatctcattagtgaacttatctttgcagctgagtacttaaattctttttaaaaagataccctttggattgatcacattgtttgacccagtatgtcttgtagacacgttagttataatcaccttgtatctctaaatatggtgtgatatgaaccagtccattcacattggaaaaactgatggttttaaataaactaattcactaatattaaaaaaaaa

SEQ ID NO: 252 - DNA, 1570 bp, Homo sapiens
gccgagccagccccttcaccaccagccggccgcgccccgggaagggaagtttgtggcggaggaggttcgtacgggaggagggggaggcgcccacgcatctggggctgactcgctctttcgcaaaacgtctgggaggagtccctggggccacaaaactgcctccttcctgaggccagaaggagagaagacgtgcagggaccccgcgcacaggagctgccctcgcgacatgggtcacccgccgctgctgccgctgctgctgctgctccacacctgcgtcccagcctcttggggcctgcggtgcatgcagtgtaagaccaacggggattgccgtgtggaagagtgcgccctgggacaggacctctgcaggaccacgatcgtgcgcttgtgggaagaaggagaagagctggagctggtggagaaaagctgtacccactcagagaagaccaacaggaccctgagctatcggactggcttgaagatcaccagccttaccgaggttgtgtgtgggttagacttgtgcaaccagggcaactctggccgggctgtcacctattcccgaagccgttacctcgaatgcatttcctgtggctcatcagacatgagctgtgagaggggccggcaccagagcctgcagtgccgcagccctgaagaacagtgcctggatgtggtgacccactggatccaggaaggtgaagaagggcgtccaaaggatgaccgccacctccgtggctgtggctaccttcccggctgcccgggctccaatggtttccacaacaacgacaccttccacttcctgaaatgctgcaacaccaccaaatgcaacgagggcccaatcctggagcttgaaaatctgccgcagaatggccgccagtgttacagctgcaaggggaacagcacccatggatgctcctctgaagagactttcctcattgactgccgaggccccatgaatcaatgtctggtagccaccggcactcacgaaccgaaaaaccaaagctatatggtaagaggctgtgcaaccgcctcaatgtgccaacatgcccacctgggtgacgccttcagcatgaaccacattgatgtctcctgctgtactaaaagtggctgtaaccacccagacctggatgtccagtaccgcagtggggctgctcctcagcctggccctgcccatctcagcctcaccatcaccctgctaatgactgccagactgtggggaggcactctcctctggacctaaacctgaaatccccctctctgccctggctggatccgggggacccctttgcccttccctcggctcccagccctacagacttgctgtgtgacctcaggccagtgtgccgacctctctgggcctcagttttcccagctatgaaaacagctatctcacaaagttgtgtgaagcagaagagaaaagctggaggaaggccgtgggccaatgggagagctcttgttattattaatattgttgccgctgttgtgttgttgttattaattaatattcatattatttattttatacttacataaagattttgtaccagtggacaaggccaaaaaaaaaaaaaaaaaa

SEQ ID NO: 253 - DNA, 5165 bp, Homo sapiens
gggaagccagacggttaacacagacaaagtgctgccgtgacactcggccctccagtgttgcggagaggcaagagcagcgaccgcggcacctgtccgcccggagctgggacgcgggcgcccgggcggccggacgaagcgaggagggaccgccgaggtgcgcgtctgtgcggctcagcctggcgggggacgcggggagaatgtggactgggtagagatgaacgagacttttctcagatgttggatatttgcttggaaaaacgtgtgggtacgaccttggctgcccccaagtgtaactccagcactgtgaggtttcagggattggcagaggggaccaaggggaccatgaaaatggacatggaggatgcggatatgactctgtggacagaggctgagtttgaagagaagtgtacatacattgtgaacgaccacccctgggattctggtgctgatggcggtacttcggttcaggcggaggcatccttaccaaggaatctgcttttcaagtatgccaccaacagtgaagaggttattggagtgatgagtaaagaatacataccaaagggcacacgttttggacccctaataggtgaaatctacaccaatgacacagttcctaagaacgccaacaggaaatatttttggaggatctattccagaggggagcttcaccacttcattgacggctttaatgaagagaaaagcaactggatgcgctatgtgaatccagcacactctccccgggagcaaaacctggctgcgtgtcagaacgggatgaacatctacttctacaccattaagcccatccctgccaaccaggaacttcttgtgtggtattgtcgggactttgcagaaaggcttcactacccttatcccggagagctgacaatgatgaatctcacacaaacacagagcagtctaaagcaaccgagcactgagaaaaatgaactctgcccaaagaatgtcccaaagagagagtacagcgtgaaagaaatcctaaaattggactccaacccctccaaaggaaaggacctctaccgttctaacatttcacccctcacatcagaaaaggacctcgatgactttagaagacgtgggagccccgaaatgcccttctaccctcgggtcgtttaccccatccgggcccctctgccagaagactttttgaaagcttccctggcctacgggatcgagagacccacgtacatcactcgctcccccattccatcctccaccactccaagcccctctgcaagaagcagccccgaccaaagcctcaagagctccagccctcacagcagccctgggaatacggtgtcccctgtgggccccggctctcaagagcaccgggactcctacgcttacttgaacgcgtcctacggcacggaaggtttgggctcctaccctggctacgcacccctgccccacctcccgccagctttcatcccctcgtacaacgctcactaccccaagttcctcttgcccccctacggcatgaattgtaatggcctgagcgctgtgagcagcatgaatggcatcaacaactttggcctcttcccgaggctgtgccctgtctacagcaatctcctcggtgggggcagcctgccccaccccatgctcaaccccacttctctcccgagctcgctgccctcagatggagcccggaggttgctccagccggagcatcccagggaggtgcttgtcccggcgccccacagtgccttctcctttaccggggccgccgccagcatgaaggacaaggcctgtagccccacaagcgggtctcccacggcgggaacagccgccacggcagaacatgtggtgcagcccaaagctacctcagcagcgatggcagcccccagcagcgacgaagccatgaatctcattaaaaacaaaagaaacatgaccggctacaagacccttccctacccgctgaagaagcagaacggcaagatcaagtacgaatgcaacgtttgcgccaagactttcggccagctctccaatctgaaggtccacctgagagtgcacagtggagaacggcctttcaaatgtcagacttgcaacaagggctttactcagctcgcccacctgcagaaacactacctggtacacacgggagaaaagccacatgaatgccaggtctgccacaagagatttagcagcaccagcaatctcaagacccacctgcgactccattctggagagaaaccataccaatgcaaggtgtgccctgccaagttcacccagtttgtgcacctgaaactgcacaagcgtctgcacacccgggagcggccccacaagtgctcccagtgccacaagaactacatccatctctgtagcctcaaggttcacctgaaagggaactgcgctgcggccccggcgcctgggctgcccttggaagatctgacccgaatcaatgaagaaatcgagaagtttgacatcagtgacaatgctgaccggctcgaggacgtggaggatgacatcagtgtgatctctgtagtggagaaggaaattctggccgtggtcagaaaagagaaagaagaaactggcctgaaagtgtctttgcaaagaaacatggggaatggactcctctcctcagggtgcagcctttatgagtcatcagatctacccctcatgaagttgcctcccagcaacccactacctctggtacctgtaaaggtcaaacaagaaacagttgaaccaatggatccttaagattttcagaaaacacttattttgtttcttaagttatgacttggtgagtcagggtgcctgtaggaagtggcttgtacataatcccagctctgcaaagctctctcgacagcaaatggtttcccctcacctctggaattaaagaaggaactccaaagttactgaaatctcagggcatgaacaaggcaaaggccatatatatatatatatatatatctgtatacatattatatatacttatttacacctgtgtctatatatttgcccctgtgtattttgaatatttgtgtggacatgtttgcatagccttcccattactaagactattacctagtcataattattttttcaatgataatccttcataatttattatacaatttatcattcagaaagcaataattaaaaaagtttacaatgactggaaagattccttgtaatttgagtataaatgtatttttgtcttgtggccattctttgtagataatttctgcacatctgtataagtacctaagatttagttaaacaaatatatgacttcagtcaacctctctctctaataatggtttgaaaatgaggtttgggtaattgccaatgttggacagttgatgtgttcattcctgggatcctatcatttgaacagcattgtacataacttgggggtatgtgtgcaggattacccaagaataacttaagtagaagaaacaagaaagggaatcttgtatatttttgttgatagttcatgtttttcccccagccacaattttaccggaagggtgacaggaaggctttaccaacctgtctctccctccaaaagagcagaatcctcccaccgccctgccctccccaccgagtcctgtggccattcagagcggccacatgacttttgcatccattgtattatcagaaaatgtgaagaagaaaaaaatgccatgttttaaaaccactgcgaaaatttccccaaagcataggtggctttgtgtgtgtgcgatttgggggcttgagtctgggtggtgttttgttgttggtttttgttgctttttttttttttttttttttaatgtcaaaattgcacaaacatggtgctctaccaggaaggattcgaggtagataggctcaggccacactttaaaaacaaacacacaaacaacaaaaaacgggtattctagtcatcttggggtaaaagcgggtaatgaacattcctatccccaacacatcaattgtattttttctgtaaaactcagattttcctcagtatttgtgtttttacattttatggttaatttaatggaagatgaaagggcattgcaaagttgttcaacaacagttacctcattgagtgtgtccagtagtgcaggaaatgatgtcttatctaatgatttgcttctctagaggagaaaccgagtaaatgtgctccagcaagatagactttgtgttattctatcttttattctgctaagcccaaagattacatgttggtgttcaaagtgtagcaaaaaatgatgtatatttataaatctatttataccactatatcatatgtatatatatttataaccacttaaattgtgagccaagccatgtaaaagatctactttttctaagggcaaaaaaaaaaaaaaaaaaaaaagaacactcctttctgagactttgcttaatacttggtgacctcacaatcacgtcggtatgattgggcacccttgcctactgtaagagaccctaaaaccttggtgcagtggtggggaccacaaaacaaccagggaggaagagatacatcattttttagtattaaggaccatctaagacagctctattttttttttgccactttatgattatgtggtcacacccaagtcacagaaataaaaaactgactttaccgctgcaatttttctgttttcctccttactaaatactgatacattactccaatctattttataattatatttgacattttgttcacatcaactaatgttcacctgtagaagagaacaaatttcgaataatccagggaaacccaagagccttactggtcttctgtaacttccaagactgacagctttttatgtatcagtgtttgataaacacagtccttaactgaaggtaaaccaaagcatcacgttgacattagaccaaatacttttgattcccaactactcgtttgttctttttctccttttgtgctttcccatagtgagaatttttataaagacttcttgcttctctcaccatccatccttctcttttctgcctcttacatgtgaatgttgagcccacaatcaacagtggttttattttttcctctactcaaagttaaaactgaccaaagttactggctttttactttgctagaacaacaaactatcttatgtttacatactggtttacaatgttatttatgtgcaaattgtcaaaatgtaaattaaatataaatgttcatgctttaccaaaat

SEQ ID NO: 254 - DNA, 9749 bp, Homo sapiens
gcggccgccccgcccccgctcccgccgccgcccgccagtcagtcagtcagtcagtcagtcagtcagtcagtcagtcactgagcgcgcggcgcgggagctgctggcagtcgctgcgtctctggcgagggagcgccgcgcctggggaggaggcggaggcagcggctggaggagcgcgagcggcggtttccttgcccggggccgcgggaaggccgaccgactgccgcgatggagcagctatcagatgaagaaattgatcatggtgctgaagaagacagtgacaaggaagatcaggacctggacaaaatgtttggagcctggcttggagaactagacaaactcactcagagtttggattctgacaagcccatggaaccagtaaaaagatctcctcttcgccaggaaacaaacatggccaacttttcttaccgcttctccatatacaacttgaatgaagctctgaatcagggagagactgtggatctggatgccttgatggctgatctttgctctatagagcaggagctcagcagcattggttcaggaaacagtaagcgtcaaatcacagaaacgaaagctactcagaaattgcctgttagccgacatacattgaaacatggcaccttgaaaggattatcttcttcatctaataggatagctaaaccttcccatgccagctactccttggacgacgtcactgcacagttagaacaggcctctttgagtatggatgaggctgctcagcaatctgtactagaagatactaaacccttagtaactaatcagcacagaagaaccgcgtcagcaggcacagtgagtgatgctgaagtacactctattagtaattcctcccattccagcatcacttccgcagcctccagcatggactctttggatattgataaagtaacacgccctcaagagctggatttgacacatcaagggcagccaattactgaggaagaacaggcagcaaaattgaaagctgagaagatcagagttgccctagagaaaattaaagaggcacaagtgaaaaagctggtgatcagagtccacatgtctgatgacagttctaaaacaatgatggtggatgagaggcagacagtaagacaagtactggataacctgatggacaaatcccactgcggttatagtttagactggtcactggtagaaaccgtttctgaattacaaatggagagaatctttgaagaccatgaaaacttggttgaaaatcttcttaattggacaagagatagccaaaacaagcttatatttatggagcgtatagaaaaatatgcacttttcaaaaacccacagaattatcttttggggaaaaaagaaacagctgagatggcagatagaaacaaagaagtcctcttggaggaatgtttttgtggaagttctgtaactgtaccagaaattgaaggagtcctttggttgaaggatgatggcaagaagtcctggaaaaagcgttattttctcttgcgagcatctggtatctactatgttcccaaaggaaaagcaaaggtctctcgggatctggtgtgctttctccagctggatcatgtcaacgtttattatggccaggactatcggaacaaatacaaagcacctacagactattgtctggtgctgaagcatccacaaatccagaagaaatctcaatatatcaaatacctttgttgtgatgatgtgaggacactgcatcagtgggtcaatgggatccgcattgcaaagtatgggaagcagctctatatgaactaccaagaagccttgaagaggacagagtcagcctatgattggacttccttatccagctccagcattaaatcgggatccagttcttccagcatcccagagtctcagtcaaaccactccaatcagtctgatagcggagtttctgacacccagccagcaggacacgtccgttcccagagcattgtgagctccgtattctctgaagcctggaaacgaggcactcagttggaagagtccagcaaggccagaatggagtctatgaatcggccctacacttcacttgtgccccctttatccccgcaacctaagatagtcaccccctacactgcttcacagccttcaccacctctacctcctccgccacccccacctcctcctccaccaccccctccaccaccccctcctcccccactccccagccagtctgcaccttctgcaggctcagcagccccaatgttcgtcaagtacagcacaataacacggctacagaatgcgtctcagcattcaggggccctgtttaagccgccaacacccccagtgatgcagtcacagtcagtgaagcctcagatcctggtaccccccaatggagttgttccaccaccccctccccctcctccacccccaaccccaggctctgccatggcccagctaaagcctgcaccgtgtgccccatcccttccacagttcagtgccccgcctcctccactgaagatccatcaagttcagcatattactcaggtggctcccccaacaccccccccacctcctcctatccctgcacccctccctccccaagctcccccaaaaccccttgtgaccatccccgcaccaaccagcaccaagactgtggcacctgttgtgactcaagctgcaccacccacacctactcctccagtgcccccagcaaaaaagcagccagctttccctgcttcttacattccaccctctccccctacccctcctgttccagtacccccgccaacattacccaagcaacagagcttctgtgcaaaaccccctccctctccactgtcaccggtgccctcggtcgtgaagcagatagccagccagtttccaccccctccaactccccctgccatggaatctcagcccttaaagcctgtcccagcaaatgtagctccacagtcccctcctgcagtaaaagcaaagcccaagtggcagcccagctccatcccagtcccttctccggacttccctcctccccctcctgaaagcagcctggtgtttcctcctccacccccatcacctgtcccagccccaccaccaccacctccacccacagcttctcctacccctgacaaaagtggatctccaggcaaaaagaccagtaagacgtccagccctgggggaaagaaaccacccccaaccccacagcgcaactccagcattaaatccagcagtggtgcagagcaccccgagcccaagagaccctcggtggacagtctagtcagcaagtttacaccgccagcagaatcagggtctcccagcaaggagaccctaccacctcctgcagcaccccccaagcctggaaaactcaatctttctggagtcaaccttcctggagttctccaacaagggtgtgtgtcagcaaaagcccctgttctgagtgggcgtggaaaggactccgtggtggaatttccttctcctccatccgattctgattttccaccccctccacctgaaacagagcttcctctgccccccattgagattccagcagttttctcgggaaacacctctccaaaagtggcagtcgttaatcctcaaccacaacaatggtctaaaatgtcagtgaagaaggcccctccacccacacgacccaaacggaatgatagcacccgcctcactcaagctgagatttctgagcagccaacaatggccacagttgtgccacaagtgcccacctctcccaaatccagccttagtgtccagcctggattcctggctgacctcaacaggacactgcaacgaaagtccatcactcggcacggctcactctcctcccgcatgtccagagcagaaccaacagccaccatggatgatatggcattgcctccaccaccccctgaactgctgtctgatcaacagaaggctggttacggaggcagtcatatatcaggctatgcaacgttgcggagaggaccccctcctgctccccccaaaagagaccagaacaccaagctctccagagactggtagccaccataggactttattttcatgatatctgtaatcactgctacaatcagctcacctgatcatctgtgaattcaggtgttcagagcctcctggtatgatgttattcaggtagtgtccagctatatgtgtatgtgtgtgtgtacacgtgcatgtacacacagctgtacagtgtgtgtatatatgtatacatatatgtatgtgtatgtgtatatagagagagagctgagagttattctatttattccttttctctcctaatctgaaaatgggtgttctgtattttgggtggaagaggcatagaaggggatgtgtgttgtctcttaagatttctatatcatgtggattggaccaaaaacttctaatcacttatttagaaggtatttataagtgtctgtccatgtgtagcctattcgtgcatgttgtgtattatataactaaggaatagatgtagaatgtgctatttctggttgagaaaaatcaccagaatgtttggtgtatctataaggcttttgtgtttgtttttccccagttggctgaagttagaattgcttgactgacacttcattgctatacatgaaggggcactttaaatcaggaaaatctctcagcttcatagaacgggtaactagtgcaggatggggaaatgttcacagacatcatctgtatgtggttgtgcatagaaagtaaatacatggcgtaattaactcagctgttctagctgcagtactgctgcagtgatccacccacatttaggatgtgctgacagataagctctttgcctacaatacatggataattagtgctataattctggatagttcctttttagtactgttttatgaagctttatcaacttggcttcatgatcctcactttgattgattttaagaggatggataacacagttatctctgtaatgttctgtcccagtatgtctttgggtcaccagttaccttcttaaaatatgtgctttaggtaggtgttattacatatctgtagacaattggtatatgaaatatacacatcctgtgccccaatatggtgcattatgaaaaacaaaatcattttctaaaatgcattttttgagcattgctctatagaagggaagggtgatgagagaacagaactggcccctgtacaggtgtcattaatctggttgtatatgggttataatatgtaatacaaaaagctcattaagtatgggactacatggagagggaagacagtttcatttatagctactggggctaccaggacccttgctgactgcagcctggttgtgattagttcaggttactaggtgttctgatggagtgggacagtccaagtccagtaactgacattacgttttatgcgtgtgcagtttggtataacgtggagtcagtgctctaacgacacactatacttctatatgcttttttctgtgaattttccttggtacatgagagaaataagtactctcatcaacttatgataaattggactattaggaataaaacaatctcagagcagctcctaaacaagagaataaaaatgggccatcccagcacttataaggggagcacatcttgtaatgaaagtctgtgcctattgttaatgattaccaatgcaaactgcagaaatcagttgacattgtcccacaaggaaaaagtgatgccagtaaagtgggggaagagatggtaaataattctagaatgagcaaaagtgcttaattagtacagtatactcaaggtcttgcataacccacactccacgaaaaccgcatcgtaaacagagagtgaacagcacctctccattgctacatctccagaatattgttcggttatgttcatgtggttatggagcaataagaatatataccattaatttttaggtctttcaaattgttcaccaagttttgtgtttgatatttatgaagtgatctttaacacatctgcattgttaatttaagcatgcacagaaatttgggtaatgtttgagtagattgccaagcgctactgtgattcatgaatgaatttctcatagtcttctgcctgcagttttatagtttgaggggcacccatatttgtgggttagagttagtaagaatatgaatccagttatcaaagtattcatccctgaggttttgagttttattgtggtggtgattttctcatgagaaggtagacaacacttcagtttttcttgagggggaaaaaatgtacccgctaaccttttttcacccatgatttgagccctaaaacaacagcctttatgttttcagtgcaggatttcttggaatttcttgcttgtatcaatcctgatgatagccatcctgaacagatgcttctggtctgttttcctggaatagcagacatccttttgaacactaatgatgccaggaagagagtaaggctagaggaggagactcattttaaccccagtccagtggcttgtccgacaacaggccatttccctttacattcctccacagacagaaatggctattaaaaatgttttaacctcatgtatgaactgaatttaaaaaaccactaaagtgatactttatacttctgttttactccctagtgggttttctttaatttggatttttgttgggatgtagcttttcctagactgtatttctgtagctctttttctctggtgtattcatggaaagcatctactgccgcacgacactagtactgtgccttctttcactgccctctgctctgcagctctcacccagcttggctgcttcaagtctgtgcagttgacttggctgtactgaaaagtgaacagcatggattaactcatcctgctgctgagggcagtgcaaacaggtgcttattagaggtagtgacttgcttaattagtgacactcctaatttctactatggataatttcaaagtagaatcactctatgcttagagttttggcaccaatgctgtagggcagcagaatctattctcagtaaaataacttatggtttattagatattctgtattggattttaccagcttgacttttactgctcagatgctttctttcccccccttagacgctgtaattctcttgggaagagtaactattcttaaggtttttacagatacccaccttagttgtaaattggatagtttatatttctgggactttttaaatgaaaatgtggaatgttaagttacaaaagacttttcatcagaaaatttcaaacaaagtaaacatggcgttttatagtcctctaaaatctaggtgctcccacccaccaaaggcatatcctgcaaagggctgtgaactatcttggtgaactgtcttgggtcccctttccatgtatgttttcttgtcactgaaaacaaacaacgctgagtttatcaagaaaatttaaattgggggatcataataattccaaccaagtgacaactctgacatcaaggttattaggagctgtacatccaattcaagttttatttgctgctattctgggagaataaacttgtatatggagaataaactaataaacttgtatcgaggaaatccataaagttataaattagcctgaaaaatatttcaggtaatggtgtggattggcctgctttgactctcagccaccaacagaaatctttgtcacctttgttcctcagctaaaagtaattttgttataaacacaaagtgactttaaacaggtaaaaaacccattcctatttttgtacattaccaaaagtttttcatatacctacagagctaactaattacaactgatttaatccactcaagtttagaccagttaaacccataggatcctgtatggttatcaatgtgatgccttgcttttcataaaataggtataattgggtcatacacttgacgagagggtgactgtttctaggggaagaaaaccctttagattgcaggtaactttcacttttttttttttaatatacactttacatttgtataaattatgcagggtactcctaaccctgtagaaatgtatgacctctcacaaagttgagatttgatccaaagagaaatgcaagtataaaagaattagatacttattatcttttaaggtttttttttttttttggtagagatgggggtctcactgtgttgcccaggctggtctcaaactcctggccacaagtgatcttcctgcctcagcctcccaaaatgctgagattacaggcatgagccactgtacccagcctttccttataaaattcaaagagaaaatttctacacctttatccctcaaataaaacaagtgctcagttcttaccgtgcccttgcaaggtctatatgtaaaagaaatctgaaatttagctgtagaataaaacttgataaataaaaagaaaaaacatacatttctccagttggtttgctctttgcttgttgaagtaataaaccgttttaaagagaaaatacttgctgtaaacccccagtgccttcaactcttttggcagaatatttttaaagaaatccagcaagcaaactttgaggtgctaatgaaagtaaaggaaggtggtatttctagttttggcagaaatgaaaagtgtctcacaagagacatcactacccacgtggggtctggctgctttctaccaaagacatttagagaagtgaattgagtcagggtgatggtgaacactacatattttatagatggttaagttgagaattaattatgtttatcatggatggctactaataccaagctcatgattgttgcagcctcaacgtcttaggcagtaaaacttgtctgcagcactaaagggggagaaacccttatattttgcaaactgtccattcgttaaatttattgtaacctaataccaaaaactgccgtttttcatattatttccccacctcctacttttttttttttttttgctacttgtaaaataaccccttctagaaaataagcattaactggaatgtttcaaacaattttgcttcattttactatcagccactagtgaactcttacagagatgtacatttaagataaaattagcttgtgctaagtgttttaaaaacattgtttactgttaaaggggaattgcacattatatttaactgggattgctccctccctcagttctttaaaaaacaagagtcaaggctcacaccaacttgtaggctgtgggagctttgccataggtagatacaatgtagaagtatacttttttaaagcatgaagaagacaaggaacttcattataatgtaccaggtagaggacattattattcaaaggattatgcacagctcagtgaagatgaagttacaatttttctcgcagctttgttgctattattttcttctgcataaatgtatgctcatttcattatgtgccttgctccctgattgtgcaaagctatatatatatatatatatatatagatagatagatagatatatgagagagatatattcagtactactgaggatgtttttctgaggatgtttttgttctgctggattaagttattttccaagttactcttgccagttatgtcagtaaactattgtaatggcttagcacactagtcgtacagtcagtgtaaatgtttttcatttacatgttttcattatatcagcttatcaaatccttaataaaaaaaattcatagatttcatttaaacatggggactttgagtgtttgtggatcggcaccattaagaatctggttttgcatttcatgtcagggtacccaaaacataggccatacacagaagaaattaagtgtggtaaataaactagtttgatatgttcaaaaaaaaaaaaaaaaaa

SEQ ID NO: 255 - DNA, 5647 bp, Homo sapiens
gcaggcggcagggctgcggcacgggccgggcggcaccatggcggcggcggcgcctgctgctgcggcggcttcttccgaggcgccagcggcgagtgcgactgcagagcccgaggccggggaccaggacagtcgcgaggttcgagtgttgcagagcctgcggggcaagatctgtgaagcaaaaaatttattgccatatcttggaccccacaaaatgagagattgtttctgtaccataaatttggaccaggaagaagtttatcgtacccaagttgtggaaaaatctttaagcccatttttcagtgaagaattttactttgagattccaagaactttccagtatttgtctttctatgtttatgataagaatgttttacaaagagatctccgtataggaaaagtagccatcaaaaaagaagacttgtgtaatcacagtggcaaagaaacttggttttcattacagcctgttgactccaattcagaggttcagggtaaagttcaccttgaattaaaactgaatgaactgataacggagaatggaactgtatgccagcagcttgttgtacacatcaaggcatgccatgggttgcctctcataaatggccaaagctgtgacccttatgcaacagtttctctagtgggcccttctaggaatgaccaaaagaagacaaaagtaaagaagaaaacaagcaatccgcagtttaatgaaatcttttattttgaggtaaccagatccagtagttacaccagaaagtcccagttccaggtagaagaggaggacattgaaaagctagaaatcaggatcgacttgtggaacaatggaaacctagtccaagatgttttcctaggtgagattaaggttcctgtgaacgtattaagaactgattcctctcatcaagcctggtacttgctacagccaagagacaatggaaacaagtcatccaaaactgatgacctggggtctcttcgattaaatatatgttatacagaagactacgtgcttccttcagagtactatggtcctttgaaaactttgctgctaaaatcaccagatgttcaaccaatatctgcctcagctgcttacattttgagtgaaatatgtcgagataaaaatgatgctgttttgccccttgtacgactgctgctgcaccatgataaacttgttccttttgccactgctgtggctgaattagacttgaaggatacacaagatgcaaacacaatttttagaggaaattccctggctacccgatgtctggatgagatgatgaaaatagtgggagggcactacctgaaagtaacattaaaacctattcttgatgagatatgtgactcctcaaaatcctgtgaaatcgatcctattaaattgaaagagggagataatgtagaaaataataaggagaatctgcgctactatgtagacaagttattcaatacaattgtaaaatcaagtatgagctgccccactgtaatgtgtgatatcttttattctctaaggcagatggctactcagagatttcctaatgaccctcatgttcagtattctgcagtgagcagctttgtatttcttcgtttctttgctgtagccgtagtatcacctcatacttttcatttgcgacctcatcatccagatgcacagacaattagaacattaactctcatctcaaaaactatacaaactttgggaagctgggggagtctgtccaaaagcaagtcaagtttcaaagagacattcatgtgtgaatttttcaaaatgtttcaagaagaaggatatattatagcagttaaaaagttcttggatgaaatttcatctactgaaactaaagagtccagtggtacgagtgagcctgtgcacctgaaagaaggtgagatgtataaaagagctcaaggaagaactcggattggaaaaaagaattttaagaaacgatggttctgcttaacaagcagagagctcacctaccacaaacagccaggcaaagatgcaatctacacaatcccagtaaaaaacattcttgctgtggaaaaactggaagagagctctttcaacaagaaaaatatgttccaagtaatacatacggagaaaccactctatgtccaggcaaataactgtgtagaagctaatgaatggatagacgtactctgcagggtgagccgatgcaatcaaaacaggctcagtttttatcatccctctgtgtatctgaacggaaattggctctgctgtcaggagactggtgaaaacactctcggctgcaagccatgtactgcaggtgtccctgcagacatccaaatagatattgatgaagacagagaaacagaaagaatttattccctttttaccctcagtttacttaagctgcagaagatggaagaggcttgtggaactattgcagtctatcaaggaccacagaaagagcctgatgattattctaactttgtaatcgaggattctgtaacaacctttaagacaattcagcaaataaaaagcataattgagaagctggatgaacctcatgaaaaatataggaagaaaagatccagtagtgcaaaatatgggagcaaggaaaatccaattgttgggaaagcatcttagagtttaacagattggttcagaagaactggaaaatattatttttcttggagcttttcaattcatcatgtattttgttcatggtatttaagaatgagcatccgcttcaatgtcatctgcctccacattgtatttaatatttaataattgaaattaattgtttgggaatcctggtattgatgtattactagagaatttaaagcccaagattcccttcatacctgtgtgaccaaatccatgtttctgcaacttctttttaatcgaaagaatcttcctagaaaagctttgtaacaaagggagaactcctccgtagcaagaaaccatctcttcttgtaacactctgttctgtggacttgttttcactaccatcagtgcctgctctatactgccaacattgtgttttactagaaaattccaattcatgacagttcagagcttttcatttagttcatgtagaccctcccactttaaaaaagaaaaaaaataagaagtgtttttcctttggtccatcagtcattacaggttccattcaagacagtgatagaaactttagaaaactgccagagcatacttgaaagttggtagatccttttgcctaaagatgtaaacaaaactcaagacagaaggaatcagggaatatgtgctattgtgtgcatcttgtttacatttgggatcagtgatggcaaaagaagtaatgagaccactgaaattgttttcattgttttaaataccaggtactcattttcttgatttgaaagtttaacatgacttctaaggacatctcttcaaaaagaaagtaaacagggaatgaaggtggtgggaaaatcacttcacttcacccactatttcatgttgtaataagggccaccataaggatgccctcctcatagtgttcggttctgatcttcctcgagaacagtcacttggcgcactttaataatctggactgctccagatttgactttagatactccatggtatctagtctttatgatcagttgaatgatcagtgtttaagtctaaaaataatgctttcctgaaaatgtttatatttcattgctgtttccttattgcctgctagccaaatggaatttgggcaagcaactctttgaagacttttttaccctagaaatttacttttgtcctaaaaaccctaactgtaaataagcagtcgaagcaagttgccaccttgaagttgagggatacactttgcttcatcagtattaaaaaccatggtactcttattttgtcttttttaattcaaaacattttctaaatgtggtactttgaaccttggagtatttacatgtttctgttcaaaactgtgacttattaatgtaagtctgctagtagtactttttttgtctgagcataagctatatttcaagatatactttgccaattttgttattggtgggtaatcatttttaaattatattgttattaggtaattatttttaaagactactggcatacaatcaaagttgttccataaaagaatataactgagcaatgtatttctctaaatgacttgtaaaaatcaatgaattatgtttaagtctgcattatggtaggttattactcccagctcattttaaagacaagtttgaaagagtcctttaaattttataagcttgtagattccataaactacactgatttatacatttgaaagaatttagccatttaataaatttcttattctcaaattgcatttagattaaaattccttttaagagtgtctgaaatgtctgcctgcgaagaacatgtaaacattgccagataccagtcattattctttagtggctttttagtcctctgcttttttttttaaggcaaaagaaatatgcatctagcatttctaataccaaatccccaattgtgattgttttaaagatcatggtatgatcacagggaccaaggctgtgtgcatatataactctggatttgaaaggaggagagttcagccatctagttcttttcttcacatgacacttttaaacagccagtttgactggaattaaccaacttggcacagcctaaaaaaggagtaatgtgaaattaaattatttttctttgaaagtcttttgaaataagagaccatgtaagtaggaccctaagacaaccaaggaatttgcttccagggccctcattcctctgctgttacttacaaatgttttaatttttactacctgatattctttctctaccttttccacatttgaaaatatacaaggcagctcacttcatcctaaaaacctaaaaactccaggaaggaaagaaaaggatgatatggggaaatttgccataaatgccggttctggttcttagtttagccatttccatcagttgaaattgtggtgtgatctgttgcttgtttcgttgttgttttgtttttgtgtagctttgttttttaatattcatttaataagatgatgggcaatagcaaacatttttactcccaggaatataatttatcaaattgaactattttatttgccaaagaaacttgtttttaatatcacgggtaatgggtaagtgtgaaaactaggcttttttttatgaaacaaaaaaaggtgacgaataatatggcttttgtttctgtttctgaagcctgatttcatttatgccaggttttgaaaaacagatctttttcttaagtgaaagcacctttaatttgctctaacggtacatcctgtaaagacagaattctgcatagccttttaggtgtttttacagtatgtgaaaaatacaagactcattctagagttaaattaccaatcttggttgatattatctgcttccatttttattaatttggaaattaatatgttgctagtaaatattggtttttacagtacccagtttgaaaatgtaagttatcaaaacttaatgtagtgaatttgtgtaaccatgttgtattgttgagaatgtatttttatttaaattttattttcttatcaagagtattataaaaattaacttttgtaactgtcgcttggaaataactcaaataaattacaagaagcctgtctgttctttgtgagactgtaaaaaaaaaaa

SEQ ID NO: 256 - DNA, 3393 bp, Homo sapiens
agtctcggctgattgccgctgtcgctcccggggccacgggatgacgcctcctccgcccggacgtgccgcccccagcgcaccgcgcgcccgcgtccctggcccgccggctcggttggggcttccgctgcggctgcggctgctgctgctgctctgggcggccgccgcctccgcccagggccacctaaggagcggaccccgcatcttcgccgtctggaaaggccatgtagggcaggaccgggtggactttggccagactgagccgcacacggtgcttttccacgagccaggcagctcctctgtgtgggtgggaggacgtggcaaggtctacctctttgacttccccgagggcaagaacgcatctgtgcgcacggtgaatatcggctccacaaaggggtcctgtctggataagcgggactgcgagaactacatcactctcctggagaggcggagtgaggggctgctggcctgtggcaccaacgcccggcaccccagctgctggaacctggtgaatggcactgtggtgccacttggcgagatgagaggctacgcccccttcagcccggacgagaactccctggttctgtttgaaggggacgaggtgtattccaccatccggaagcaggaatacaatgggaagatccctcggttccgccgcatccggggcgagagtgagctgtacaccagtgatactgtcatgcagaacccacagttcatcaaagccaccatcgtgcaccaagaccaggcttacgatgacaagatctactacttcttccgagaggacaatcctgacaagaatcctgaggctcctctcaatgtgtcccgtgtggcccagttgtgcaggggggaccagggtggggaaagttcactgtcagtctccaagtggaacacttttctgaaagccatgctggtatgcagtgatgctgccaccaacaagaacttcaacaggctgcaagacgtcttcctgctccctgaccccagcggccagtggagggacaccagggtctatggtgttttctccaacccctggaactactcagccgtctgtgtgtattccctcggtgacattgacaaggtcttccgtacctcctcactcaagggctaccactcaagccttcccaacccgcggcctggcaagtgcctcccagaccagcagccgatacccacagagaccttccaggtggctgaccgtcacccagaggtggcgcagagggtggagcccatggggcctctgaagacgccattgttccactctaaataccactaccagaaagtggccgtccaccgcatgcaagccagccacggggagacctttcatgtgctttacctaactacagacaggggcactatccacaaggtggtggaaccgggggagcaggagcacagcttcgccttcaacatcatggagatccagcccttccgccgcgcggctgccatccagaccatgtcgctggatgctgagcggaggaagctgtatgtgagctcccagtgggaggtgagccaggtgcccctggacctgtgtgaggtctatggcgggggctgccacggttgcctcatgtcccgagacccctactgcggctgggaccaaggccgctgcatctccatctacagctccgaacggtcagtgctgcaatccattaatccagccgagccacacaaggagtgtcccaaccccaaaccagacaaggccccactgcagaaggtttccctggccccaaactctcgctactacctgagctgccccatggaatcccgccacgccacctactcatggcgccacaaggagaacgtggagcagagctgcgaacctggtcaccagagccccaactgcatcctgttcatcgagaacctcacggcgcagcagtacggccactacttctgcgaggcccaggagggctcctacttccgcgaggctcagcactggcagctgctgcccgaggacggcatcatggccgagcacctgctgggtcatgcctgtgccctggccgcctccctctggctgggggtgctgcccacactcactcttggcttgctggtccactagggcctcccgaggctgggcatgcctcaggcttctgcagcccagggcactagaacgtctcacactcagagccggctggcccgggagctccttgcctgccacttcttccaggggacagaataacccagtggaggatgccaggcctggagacgtccagccgcaggcggctgctgggccccaggtggcgcacggatggtgaggggctgagaatgagggcaccgactgtgaagctggggcatcgatgacccaagactttatcttctggaaaatatttttcagactcctcaaacttgactaaatgcagcgatgctcccagcccaagagcccatgggtcggggagtgggtttggataggagagctgggactccatctcgaccctggggctgaggcctgagtccttctggactcttggtacccacattgcctccttcccctccctctctcatggctgggtggctggtgttcctgaagacccagggctaccctctgtccagccctgtcctctgcagctccctctctggtcctgggtcccacaggacagccgccttgcatgtttattgaaggatgtttgctttccggacggaaggacggaaaaagctctatttttatgttaggcttatttcatgtatagctacttccgactgcatctgtatgaaaataccaaaactacatgcgggggggtgggtgggaaagggaggggctgggaagggatgggttggggagcgggggtgatcccagtctgaggctcccggggatgagataagagtctggagacgggcatgggttcttggagagtggcatgagctggctctgccctgggagcccggtctgagggggacgttgttggagcccctagtgttgggggtggttatgggagggggtggggtgagggaaacgggagaatgaaggagaaaactgagccctagtttcaccgtgttcatttggaaggacgagccgggtcctcagggggaggttccaggactctgcccttggcgttgagggttggggggcggggggcctcctcccttcctctcagcccccttccccaggggctgtgcttccatgctcctagcctcccaccttcgctcaggacatgttataacttaggctaaactgtgaaaattccggtggggatggcctgggccgagctctccaggcaggcggccctgcccccagccctgtccatccatttcaggggggagctgggcccttctccggctgtgtctggccacccagggcagtggctggggccagtggccttccagctttggcccctgcacctcttctcaatgcactttaataatgtaacatattactaataaacaagctatttatttaaaaaaaaaaaaaaaaaa

SEQ ID NO: 257 - DNA, 4167 bp, Homo sapiens
agcgggagtccgcggcgagcgcagcagcagggccgggtcctgcgcctcgggggtcggcgtccaggctcggagcgcggcacggagacggcggcagcgctggactaggtggcaggccctgcatcatggaaactctttctaatgcaagtggtacttttgccatacgccttttaaagatactgtgtcaagataacccttcgcacaacgtgttctgttctcctgtgagcatctcctctgccctggccatggttctcctaggggcaaagggaaacaccgcaacccagatggcccaggcactgtctttaaacacagaggaagacattcatcgggctttccagtcgcttctcactgaagtgaacaaggctggcacacagtacctgctgagaacggccaacaggctctttggagagaaaacttgtcagttcctctcaacgtttaaggaatcctgtcttcaattctaccatgctgagctgaaggagctttcctttatcagagctgcagaagagtccaggaaacacatcaacacctgggtctcaaaaaagaccgaaggtaaaattgaagagttgttgccgggtagctcaattgatgcagaaaccaggctggttcttgtcaatgccatctacttcaaaggaaagtggaatgaaccgtttgacgaaacatacacaagggaaatgccctttaaaataaaccaggaggagcaaaggccagtgcagatgatgtatcaggaggccacgtttaagctcgcccacgtgggcgaggtgcgcgcgcagctgctggagctgccctacgccaggaaggagctgagcctgctggtgctgctgcctgacgacggcgtggagctcagcacggtggaaaaaagtctcacttttgagaaactcacagcctggaccaagccagactgtatgaagagtactgaggttgaagttctccttccaaaatttaaactacaagaggattatgacatggaatctgtgcttcggcatttgggaattgttgatgccttccaacagggcaaggctgacttgtcggcaatgtcagcggagagagacctgtgtctgtccaagttcgtgcacaagagttttgtggaggtgaatgaagaaggcaccgaggcagcggcagcgtcgagctgctttgtagttgcagagtgctgcatggaatctggccccaggttctgtgctgaccaccctttccttttcttcatcaggcacaacagagccaacagcattctgttctgtggcaggttctcatcgccataaagggtgcacttaccgtgcactcggccatttccctcttcctgtgtccccagatccccactacagctccaagaggatgggcctagaaagccaagtgcaaagatgagggcagattctttacctgtctgccctcatgatttgccagcatgaattcatgatgctccacactcgcttatgctacttaatcagaatcttgagaaaatagaccataatgattccctgttgtattaaaattgcagtccaaatcccataggatggcaagcaaagttcttctagaattccacatgcaattcactctggcgaccctgtgctttcctgacactgcgaatacattccttaacccgctgcctcagtggtaataaatggtgctagatattgctactattttatagatttcctggtgcttagccttataaaaaaggttgtaaaatgtacatttatattttatcttttttttttttttttttctgagacgcagtctggctctctgtcgcccaggctggagtgcagtggctcgatctcggctcactgcaagctccgcctcccgggttcacgccattctcctgcctcagcctcccgagtagctgggactacaggcgcccgccaccacgcccggctaattttttgtatttttagtagagacggggtttcaccgtgttagccaggatggtgtcgatctcctgacctcgtgatccacccgcctcggcctcccaaagtgctgggattacaggcttgagccaccgcgcccggctatattttatcttttatctttttctttgacatttaccaatcaccaagcatgcaccaaacactgctttaggcactggggacacaaaggggacagagccatcctcctttgacacctggtcttcagttctgtgcccaacgtatatagttttgacaatgaccaggttggactgtttaatgtctttcaacttaccacgtaatcctcttgtagggatcacatctttctttatgatattgtatttctctacctctaacagtaaaaattccattcaacccttaaagctcacttcaaattcttctttgagaagtttttcctttctccgcaaccagatgtacatatttgaactctctttgtacttggagggcacttctttcgtggtagttcttttatttttattaatctctgtatccttagatagtcctccaacaaccaaaggttgggactctgtcttacatatctgggtgcccctcatagtgcagtaataagtaagttgattatatacgagctatgtaacttatattttttaatggttggatatcactgagtttttttttttaagaatttttttattgaggtaaacttcacataacataaaattaactattttaaagtgagaagttcagtgccacttagtattgttaacaatgttgcataaccaccacctttatttaaagttccaaaaaaaatgttctcctctaaaaggaaaccccatcccattaagcagatactctccattccttccttcctccagcccccagcaaccaccaatctgctttctgtctctatggatttatctattcttgctattttatataaattgaattgtatgagaccttttgtgtctggcttctttcacttagtacaagtttttgagatttatttacatagtagcatgtatcaacacttcatttttatggccaaataaaattgtattatgtgtttatagcacaatttatttatccactcattcattgatggactttgggttgtttctgacttttggctattgggaatagtgctgctatgaatgtttgtgtacctgtatttgtttgaatgcctattttgcattctcttgggtatatatctaggagtggaactgctgggtcatatgttaattctatgtttagctttttgaggaacagacaaactgttttccacagcagttgaaccattccacattcccaccagcaatgtatgagaattccaatttctgtccacttcctcaccaacacttattattttccttttcctttttttaaaaaaaataagttatggccatcttagtgggtgtgaagtggtatctcattgtgttttttatttgcatttcctatgtaatgagctagaaactaaagtacaaactagatgggacatccagtccctttgatagataatgctgagtaaaaaatgagatgaaagacatttgtttgtttttagaacacgagtgacagtttgttaaaaagctttagaggaggaatgaaaacaaagtgaagtacacttagaaaagggccaagtggacatcttggatgtcaagtgcctagttcagtatcttttttttttttttttttttttttgagacagtgcctcactctgtcacccaggctggagtgtagtggcatgatctgggctcactgcaacctcctcctcctggattcaagcaattctcttgcttcagcctcccaagtagctgagactacaagcacccaccatcacacccagctaattttgtatttttcagtagagacggggtttcgccacattggccgtgttggtcttgaactcctggcctcaagcgatccgcctacctcagcctcccaaagtgctaggattacaggcataagccactgagcccagccctagttcagtatcttttatgtaaattacaaacatctgcaacattatgtatcatatgcagatacttattgcatttcttttattagtggtgaaagtgttctatgcatttattggctcttgaatttcctcatctatgaattgtcattcatacacctacttttctgcttcgtttttacatatgtctttgcctattaaagatattatccctctgttttatattttctctcattcttgtattgccttttaaattttgttatgatgtttcattaataaacagtgttttgttttcctctataatcaaaaaaaaaaaaaaaaaaa

SEQ ID NO: 258 - DNA, 3207 bp, Homo sapiens
ggcccacagaggagcacagctgtgtttggctgcagggccaagagcgctgtcaagaagacccacacgcccccctccagcagctgaattcctgcagctcagcagccgccgccagagcaggacgaaccgccaatcgcaaggcacctctgagaacttcaggatgcagatgtctccagccctcacctgcctagtcctgggcctggcccttgtctttggtgaagggtctgctgtgcaccatcccccatcctacgtggcccacctggcctcagacttcggggtgagggtgtttcagcaggtggcgcaggcctccaaggaccgcaacgtggttttctcaccctatggggtggcctcggtgttggccatgctccagctgacaacaggaggagaaacccagcagcagattcaagcagctatgggattcaagattgatgacaagggcatggcccccgccctccggcatctgtacaaggagctcatggggccatggaacaaggatgagatcagcaccacagacgcgatcttcgtccagcgggatctgaagctggtccagggcttcatgccccacttcttcaggctgttccggagcacggtcaagcaagtggacttttcagaggtggagagagccagattcatcatcaatgactgggtgaagacacacacaaaaggtatgatcagcaacttgcttgggaaaggagccgtggaccagctgacacggctggtgctggtgaatgccctctacttcaacggccagtggaagactcccttccccgactccagcacccaccgccgcctcttccacaaatcagacggcagcactgtctctgtgcccatgatggctcagaccaacaagttcaactatactgagttcaccacgcccgatggccattactacgacatcctggaactgccctaccacggggacaccctcagcatgttcattgctgccccttatgaaaaagaggtgcctctctctgccctcaccaacattctgagtgcccagctcatcagccactggaaaggcaacatgaccaggctgccccgcctcctggttctgcccaagttctccctggagactgaagtcgacctcaggaagcccctagagaacctgggaatgaccgacatgttcagacagtttcaggctgacttcacgagtctttcagaccaagagcctctccacgtcgcgcaggcgctgcagaaagtgaagatcgaggtgaacgagagtggcacggtggcctcctcatccacagctgtcatagtctcagcccgcatggcccccgaggagatcatcatggacagacccttcctctttgtggtccggcacaaccccacaggaacagtccttttcatgggccaagtgatggaaccctgaccctggggaaagacgccttcatctgggacaaaactggagatgcatcgggaaagaagaaactccgaagaaaagaattttagtgttaatgactctttctgaaggaagagaagacatttgccttttgttaaaagatggtaaaccagatctgtctccaagaccttggcctctccttggaggacctttaggtcaaactccctagtctccacctgagaccctgggagagaagtttgaagcacaactcccttaaggtctccaaaccagacggtgacgcctgcgggaccatctggggcacctgcttccacccgtctctctgcccactcgggtctgcagacctggttcccactgaggccctttgcaggatggaactacggggcttacaggagcttttgtgtgcctggtagaaactatttctgttccagtcacattgccatcactcttgtactgcctgccaccgcggaggaggctggtgacaggccaaaggccagtggaagaaacaccctttcatctcagagtccactgtggcactggccacccctccccagtacaggggtgctgcaggtggcagagtgaatgtcccccatcatgtggcccaactctcctggcctggccatctccctccccagaaacagtgtgcatgggttattttggagtgtaggtgacttgtttactcattgaagcagatttctgcttccttttatttttataggaatagaggaagaaatgtcagatgcgtgcccagctcttcaccccccaatctcttggtggggaggggtgtacctaaatatttatcatatccttgcccttgagtgcttgttagagagaaagagaactactaaggaaaataatattatttaaactcgctcctagtgtttctttgtggtctgtgtcaccgtatctcaggaagtccagccacttgactggcacacacccctccggacatccagcgtgacggagcccacactgccaccttgtggccgcctgagaccctcgcgccccccgcgcccctctttttccccttgatggaaattgaccatacaatttcatcctccttcaggggatcaaaaggacggagtggggggacagagactcagatgaggacagagtggtttccaatgtgttcaatagatttaggagcagaaatgcaaggggctgcatgacctaccaggacagaactttccccaattacagggtgactcacagccgcattggtgactcacttcaatgtgtcatttccggctgctgtgtgtgagcagtggacacgtgaggggggggtgggtgagagagacaggcagctcggattcaactaccttagataatatttctgaaaacctaccagccagagggtagggcacaaagatggatgtaatgcactttgggaggccaaggcgggaggattgcttgagcccaggagttcaagaccagcctgggcaacataccaagacccccgtctctttaaaaatatatatattttaaatatacttaaatatatatttctaatatctttaaatatatatatatattttaaagaccaatttatgggagaattgcacacagatgtgaaatgaatgtaatctaatagaagcctaatcagcccaccatgttctccactgaaaaatcctctttctttggggtttttctttctttcttttttgattttgcactggacggtgacgtcagccatgtacaggatccacaggggtggtgtcaaatgctattgaaattgtgttgaattgtatgctttttcacttttgataaataaacatgtaaaaatgtttcaaaaaaataataaaataaataaatacgaagaatatgtcaggacagtcaaaaaaaaaaaaaaaaaa

SEQ ID NO: 259 - DNA, 3208 bp, Homo sapiens
agatattcatgaaccgttgcttcttccagcctcgccttctcgctccctctgcctttctggcgctgttctccctccctccctctggcttctgctctttcttactccttctctcagctgcttaactacagctcccactggaacttgcacaatcaaaaacaactctcctctctcaagccgcctccaggagcgcatcacctggagaagagcgactcgctccccgcgccggccgcggaagagcagccaggtagctgggggcggggaggcgtacccttctcccgctcggtaagagccacagcatctccccggagattggccgtatcccaccgtccggcccccagggtcctgcagcggtgatgcatatgtttcggagcaatgatggaaggagaaaagccgctgtcggtggcaactgaaagtggggagaggttgctgcagtagctggtgctgcagaatgcgcgagtgaagaactgagccccgctagattctccatcccgctcagtcttcattaactgtctgcaggaggtaaaccggggaaacagatatgcactaaccaggcgggtgccaacctggatctataactgtgaattccccacggtggaaaatggtaaacaaagacatgaatggattcccagtcaagaaatgctcagccttccaattttttaagaagcgggtacgaaggtggatcaagagcccaatggtcagtgtggacaagcatcagagtcccagcctgaagtacaccggctcctccatggtgcacatccctccaggggagccagacttcgagtcttccttgtgtcaaacatgcctgggtgaacatgctttccaaagaggggttctccctcaggagaacgagtcatgttcatgggaaactcaatctgggtgtgaagtgagagagccatgtaatcatgccaacatcctgaccaagcccgatccaagaaccttctggactaatgatgatccagctttcatgaagcagaggaggatgggtctgaacgactttattcagaagattgccaataactcctatgcatgcaaacaccctgaagttcagtccatcttgaagatctcccaacctcaggagcctgagcttatgaatgccaacccttctcctccaccaagtccttctcagcaaatcaaccttggcccgtcgtccaatcctcatgctaaaccatctgactttcacttcttgaaagtgatcggaaagggcagttttggaaaggttcttctagcaagacacaaggcagaagaagtgttctatgcagtcaaagttttacagaagaaagcaatcctgaaaaagaaagaggagaagcatattatgtcggagcggaatgttctgttgaagaatgtgaagcaccctttcctggtgggccttcacttctctttccagactgctgacaaattgtactttgtcctagactacattaatggtggagagttgttctaccatctccagagggaacgctgcttcctggaaccacgggctcgtttctatgctgctgaaatagccagtgccttgggctacctgcattcactgaacatcgtttatagagacttaaaaccagagaatattttgctagattcacagggacacattgtccttactgacttcggactctgcaaggagaacattgaacacaacagcacaacatccaccttctgtggcacgccggagtatctcgcacctgaggtgcttcataagcagccttatgacaggactgtggactggtggtgcctgggagctgtcttgtatgagatgctgtatggcctgccgcctttttatagccgaaacacagctgaaatgtacgacaacattctgaacaagcctctccagctgaaaccaaatattacaaattccgcaagacacctcctggagggcctcctgcagaaggacaggacaaagcggctcggggccaaggatgacttcatggagattaagagtcatgtcttcttctccttaattaactgggatgatctcattaataagaagattactcccccttttaacccaaatgtgagtgggcccaacgacctacggcactttgaccccgagtttaccgaagagcctgtccccaactccattggcaagtcccctgacagcgtcctcgtcacagccagcgtcaaggaagctgccgaggctttcctaggcttttcctatgcgcctcccacggactctttcctctgaaccctgttagggcttggttttaaaggattttatgtgtgtttccgaatgttttagttagccttttggtggagccgccagctgacaggacatcttacaagagaatttgcacatctctggaagcttagcaatcttattgcacactgttcgctggaagctttttgaagagcacattctcctcagtgagctcatgaggttttcatttttattcttccttccaacgtggtgctatctctgaaacgagcgttagagtgccgccttagacggaggcaggagtttcgttagaaagcggacgctgttctaaaaaaggtctcctgcagatctgtctgggctgtgatgacgaatattatgaaatgtgccttttctgaagagattgtgttagctccaaagcttttcctatcgcagtgtttcagttctttattttcccttgtggatatgctgtgtgaaccgtcgtgtgagtgtggtatgcctgatcacagatggattttgttataagcatcaatgtgacacttgcaggacactacaacgtgggacattgtttgtttcttccatatttggaagataaatttatgtgtagacttttttgtaagatacggttaataactaaaatttattgaaatggtcttgcaatgactcgtattcagatgcttaaagaaagcattgctgctacaaatatttctatttttagaaagggtttttatggaccaatgccccagttgtcagtcagagccgttggtgtttttcattgtttaaaatgtcacctgtaaaatgggcattatttatgtttttttttttgcattcctgataattgtatgtattgtataaagaacgtctgtacattgggttataacactagtatatttaaacttacaggcttatttgtaatgtaaaccaccattttaatgtactgtaattaacatggttataatacgtacaatccttccctcatcccatcacacaactttttttgtgtgtgataaactgattttggtttgcaataaaaccttgaaaaatatttacatataaaaaaaa

SEQ ID NO: 260 - DNA, 5265 bp, Homo sapiens
ggcgccggctgcgtcccggcctcctcctcctcttcctccgccctccttggctgggaaagtgggaggcggcggcggcggcgtggtgtgtgtgcgcgcgtgaggggggcagcagagaggagtctcccggtgccgccgcggcgtcagagacactgcgagcggcgagcgcggtggggccgcatctgcatcagccgccgcagccgctgcggggccgcgaacaaagaggaggagccgaggcgcgagagcaaagtctgaaatggatgttacatgagtcattttaagggatgcacacaactatgaacatttctgaagattttttctcagtaaagtagataaagatggatgaatcagccttgttggatcttttggagtgtccggtgtgtctagagcgccttgatgcttctgcgaaggtcttgccttgccagcatacgttttgcaagcgatgtttgctggggatcgtaggttctcgaaatgaactcagatgtcccgagtgcaggactcttgttggctcgggtgtcgaggagcttcccagtaacatcttgctggtcagacttctggatggcatcaaacagaggccttggaaacctggtcctggtgggggaagtgggaccaactgcacaaatgcattaaggtctcagagcagcactgtggctaattgtagctcaaaagatctgcagagctcccagggcggacagcagcctcgggtgcaatcctggagccccccagtgaggggtatacctcagttaccatgtgccaaagcattatacaactatgaaggaaaagagcctggagaccttaaattcagcaaaggtgacatcatcattttgcgaagacaagtggatgaaaattggtaccatggggaagtcaatggaatccatggctttttccccaccaactttgtgcagattattaaaccgttacctcagcccccacctcagtgcaaagcactttatgactttgaagtgaaagacaaggaagcagacaaagattgccttccatttgcaaaggatgatgttctgactgtgatccgaagagtggatgaaaactgggctgaaggaatgctggcagacaaaataggaatatttccaatttcatatgttgagtttaactcggctgctaagcagctgatagaatgggataagcctcctgtgccaggagttgatgctggagaatgttcctcggcagcagcccagagcagcactgccccaaagcactccgacaccaagaagaacaccaaaaagcggcactccttcacttccctcactatggccaacaagtcctcccaggcatcccagaaccgccactccatggagatcagcccccctgtcctcatcagctccagcaaccccactgctgctgcacggatcagcgagctgtctgggctctcctgcagtgccccttctcaggttcatataagtaccaccgggttaattgtgaccccgcccccaagcagcccagtgacaactggcccctcgtttactttcccatcagatgttccctaccaagctgcccttggaactttgaatcctcctcttccaccaccccctctcctggctgccactgtccttgcctccacaccaccaggcgccaccgccgctgctgctgctgctggaatgggaccgaggcccatggcaggatccactgaccagattgcacatttacggccgcagactcgccccagtgtgtatgttgctatatatccatacactcctcggaaagaggatgaactagagctgagaaaaggggagatgtttttagtgtttgagcgctgccaggatggctggttcaaagggacatccatgcataccagcaagataggggttttccctggcaattatgtggcaccagtcacaagggcggtgacaaatgcttcccaagctaaagtccctatgtctacagctggccagacaagtcggggagtgaccatggtcagtccttccacggcaggagggcctgcccagaagctccagggaaatggcgtggctgggagtcccagtgttgtccccgcagctgtggtatcagcagctcacatccagacaagtcctcaggctaaggtcttgttgcacatgacggggcaaatgacagtcaaccaggcccgcaatgctgtgaggacagttgcagcgcacaaccaggaacgccccacggcagcagtgacacccatccaggtacagaatgccgccggcctcagccctgcatctgtgggcctgtcccatcactcgctggcctccccacaacctgcgcctctgatgccaggctcagccacgcacactgctgccatcagtatcagtcgagccagtgcccctctggcctgtgcagcagctgctccactgacttccccaagcatcaccagtgcttctctggaggctgagcccagtggccggatagtgaccgttctccctggactccccacatctcctgacagtgcttcatcagcttgtgggaacagttcagcaaccaaaccagacaaggatagcaaaaaagaaaaaaagggtttgttgaagttgctttctggcgcctccactaaacggaagccccgcgtgtctcctccagcatcgcccaccctagaagtggagctgggcagtgcagagcttcctctccagggagcggtggggcccgaactgccaccaggaggtggccatggcagggcaggctcctgccctgtggacggggacggaccggtcacgactgcagtggcaggagcagccctggcccaggatgcttttcataggaaggcaagttccctggactccgcagttcccatcgctccacctcctcgccaggcctgttcctccctgggtcctgtcttgaatgagtctagacctgtcgtttgtgaaaggcacagggtggtggtttcctatcctcctcagagtgaggcagaacttgaacttaaagaaggagatattgtgtttgttcataaaaaacgagaggatggctggttcaaaggcacattacaacgtaatgggaaaactggccttttcccaggaagctttgtggaaaacatatgaggagactgacactgaagaagcttaaaatcacttcacacaacaaagtagcacaaagcagtttaacagaaagagcacatttgtggacttccagatggtcaggagatgagcaaaggattggtatgtgactctgatgccccagcacagttaccccagcgagcagaatgaagaagatgtttgtgtgggttttgttagtctggattcggatgtataaggtgtgccttgtactgtctgatttactacacagagaaacttttttttttttttaagatatatgactaaaatggacaattgtttacaaggcttaactaatttatttgcttttttaaacttgaacttttcgtataatagatacgttctttggattatgattttaagaaattattaatttatgaaatgataggtaaggagaagctggattatctcctgttgagagcaagagattcgttttgacatagagtgaatgcattttcccctctcctcctccctgctaccattatattttggggttatgttttgcttctttaagatagaaatcccagttctctaatttggttttcttctttgggaaaccaaacatacaaatgaatcagtatcaattagggcctggggtagagagacagaaacttgagagaagagaagttagtgattccctctctttctagtttggtaggaatcaccctgaagacctagtcctcaatttaattgtgtgggtttttaattttcctagaatgaagtgactgaaacaatgagaaagaatacagcacaacccttgaacaaaatgtatttagaaatatatttagttttatagcagaagcagctcaattgtttggttggaaagtaggggaaattgaagttgtagtcactgtctgagaatggctatgaagcgtcatttcacattttaccccaactgacctgcatgcccaggacacaagtaaaacatttgtgagatagtggtggtaagtgatgcactcgtgttaagtcaaaggctataagaaacactgtgaaaagttcatattcatccattgtgattctttccccacgtcttgcatgtattactggattcccacagtaatatagactgtgcatggtgtgtatatttcattgcgatttcctgttaagatgagtttgtactcagaattgaccaattcaggaggtgtaaaaataaacagtgttctcttctctaccccaaagccactactgaccaaggtctcttcagtgcactcgctccctctctggctaaggcatgcattagccactacacaagtcattagtgaaagtggtcttttatgtcctcccagcagacagacatcaaggatgagttaaccaggagactactcctgtgactgtggagctctggaaggcttggtgggagtgaatttgcccacaccttacaattgtggcaggatccagaagagcctgtctttttatatccattccttgatgtcattggcctctcccaccgatttcattacggtgccacgcagtcatggatctgggtagtccggaaaacaaaaggagggaagacagcctggtaatgaataagatccttaccacagttttctcatgggaaatacataataaaccctttcatctttttttttttcctttaagaattaaaactgggaaatagaaacatgaactgaaaagtcttgcaatgacaagaggtttcatggtcttaaaaagatactttatgtggttgaagatgaaatcattcctaaattaaccttttttttaaaaaaaaacaatgtatattatgttcctgtgtgttgaatttaaaaaaaaaatactttacttggatattcatgtaatatataaaggtttggtgaaatgaactttagttaggaaaaagctggcatcagctttcatctgtgtaagttgacaccaatgtgtcataatattctttattttgggaaattagtgtattttataaaaattttaaaaagaaaaaagactactacaggttaagataatttttttacctgtcttttctccatattttaagctatgtgattgaagtacctctgttcatagtttcctggtataaagttggttaaaatttcatctgttaatagatcattaggtaatataatgtatgggttttctattggttttttgcagacagtagagggagattttgtaacaagggcttgttacacagtgatatggtaatgataaaattgcaatttatcactccttttcatgttaataatttgaggactggataaaaggtttcaagattaaaatttgatgttcaaacctttgt

SEQ ID NO: 261 - DNA, 4961 bp, Homo sapiens
acaaagagaaggcgcccgggcggccgcggtcccgcccactgacgcgtccccggggtgccgctataacccgccgctcgcagggctgctccacagccgcgcgacgccgccgccttagaacgcctttccagtactgctagcagcagcccgaccacgcgttaccgcacgctcgcgcctttcccttgacacggcggacgccggaggattggggcggcaatttgtcttttccttttttattaaaattatttttcctgcctgttgttggatttggggaaattttttgtttgttttttatgatttgtatttgactgagagaaacccactgaagacgtctgcgtgagaatagagaccaccgaggccgactcgcgggccgctgcacccaccgccaaggacaaaaggagcccagcgctactagctgcacccgattcctcccagtgcttagcatgaagaaggccgaaatgggacgattcagtatttccccggatgaagacagcagcagctacagttccaacagcgacttcaactactcctaccccaccaagcaagctgctctgaaaagccattatgcagatgtagatcctgaaaaccagaactttttacttgaatcgaatttggggaagaagaagtatgaaacagaatttcatccaggtactacttcctttggaatgtcagtatttaatctgagcaatgcgattgtgggcagtggaatccttgggctttcttatgccatggctaatactggaattgctctttttataattctcttgacatttgtgtcaatattttccctgtattctgttcatctccttttgaagactgccaatgaaggagggtctttattatatgaacaattgggatataaggcatttggattagttggaaagcttgcagcatctggatcaattacaatgcagaacattggagctatgtcaagctacctcttcatagtgaaatatgagttgcctttggtgatccaggcattaacgaacattgaagataaaactggattgtggtatctgaacgggaactatttggttctgttggtgtcattggtggtcattcttcctttgtcgctgtttagaaatttaggatatttgggatataccagtggcctttccttgttgtgtatggtgttctttctgattgtggtcatttgcaagaaatttcaggttccgtgtcctgtggaagctgctttgataattaacgaaacaataaacaccaccttaacacagccaacagctcttgtacctgctttgtcacataacgtgactgaaaatgactcttgcagacctcactattttattttcaactcacagactgtctatgctgtgccaattctgatcttttcatttgtctgtcatcctgctgttcttcccatctatgaagaactgaaagaccgcagccgtagaagaatgatgaatgtgtccaagatttcattttttgctatgtttctcatgtatctgcttgccgccctctttggatacctaacattttacgaacatgttgagtcagaattgcttcatacctactcttctatcttgggaactgatattcttcttctcattgtccgtctggctgtgttaatggctgtgaccctgacagtaccagtagttattttcccaatccggagttctgtaactcacttgttgtgtgcatcaaaagatttcagttggtggcgtcatagtctcattacagtgtctatcttggcatttaccaatttacttgtcatctttgtcccaactattagggatatctttggttttattggtgcatctgcagcttctatgttgatttttattcttccttctgccttctatatcaagttggtgaagaaagaacctatgaaatctgtacaaaagattggggctttgttcttcctgttaagtggtgtactggtgatgaccggaagcatggccttgattgttttggattgggtacacaatgcacctggaggtggccattaattggcaccactcaaactcaaactcagtccatctgatgccagtgttgagtaaactcaactactatgaaatttcacctaatgttttcagtttcacttccttttgaagtgcagattcctcgctggttcttctgagtgcagaataagtgaacttttttgttttgttttgtttttttaagaaacttatctgtatgttagaaatggatatgaacaacaaaaccacgagtctcgggttaagggaagtgacaattttattccattccagagaatggacaaactcttaacttttatcaagccacatgcttggctgtgtcattgtttaacttggatattttatgattttacttgaatgtgcctaatggaaccatttgatgtgagaaacaattctttttaatttacagcaaaatattgaataaccattgacaaaaacactattattttttgtaccaaaaatacttaaagacctcagaagcactcttttacttttaagaaattgcttttttgaactttattcagaagcagttatcaataaattccataaaataatgtcattggtatttaaaaatgaatattaatataatgaaatggtttgcctttttgtaggcataataagccaaatacttttttacccaaaataatttttagagaaaatgatgtaatgaaaaattgtaccatgaattaggagcatagttttttccatttaaacgtcaccattacttaaaagatgattgattattgctataccaaatcagatgaactctgttcatcacttttcttctctgtccccaaacaatttggttcattcagactgaaatgtttgtgtcttcaacttattagaatggaagataatgcagatatttctgtgggaaataaaataactaattttgaggtaccaaatagtgcaattgggtaaaacagggtttattcagttgcatctgtctccagtgttgtattgacagctctgggtctttttttgggccagcccttttttgacattgcttccagcagtggaaaatgggcatttgatggcaataggccaaaattattgtgtccagagagtacactttttcaaaatgctcacctactggaagtgtgaattacttgacaatgtatggcttagttgtgttcatgttttgtctacagtagaggtctaatccacaggttacacctatgtttgatatgatataagttctctttgcgtaggccactgggtttctcatgcagtaagctttataaaaactcatttgcactggactgtcatctcattcttgtacaacgtagaattacttgtttacatccaacaaatggttagctagggaaaacagtgcaaactgagtgttagtagtcattttggtccaactgcatgtcaacccttccatttcaatcccagttagaaatgaaaataattactttgaaacttggctttaagagcacatttatcgtacgtcacagtgtatggtgaatatattattaaataatgtggtacttcgctcatcaggcataatgtctaaaatctaatatacataattccattaagtggttgaaggaagcaaataatggaattgtcaattggtcatctggctgtaaggtttgcccttgaactaaaaatgttgtttggggcaagggccagaaatgtggagacatggtttttgttacgcattcttgtattatatgtgactaaatttacaaacaagatacatgtgtaattaaagacccttatggaactggaagacgtcttgtagtgctacattgggtgaaaccgttggtccatttttgtctgtttctatgaagataaaataattgggggccatctagaaatagaaaggcagtgggaagacagattctacggcactgctttcatttaattgggctttaggcactccattcgaatgcagaacctcacctctagttgagaccaagaattggcaaatttgcatgagctcctggaaagagttgctgactttgtatctaagacctgccagggaataccaagagttgtttctacagacttttttttttttttttgtatgggagaagatactgtggcaaccaggaaggaatggaaaaaaaattcttttctctacagcaaattaatgtgaggaagctcctccaatcctctggctatttaaggttcaaaatcaagtgcctagggaaaattccaatggatgattttctgggagctatcttgtctaccttgaggttcctgaacaatgaattcccattaatgagcagtcttcagtattaaaaccactgtcttgtcacctcattttgcattactgtcttccgtggatgtttcagttacaactgtaatgttatttatagaacaacattaatccattaaagctaacctatttttcaatatttatgataatctatgtacatatattgtctgtccatatgtatttgtaaataggttgtatataatgtcaggtttgggtcttgggttcaagtgtatatattcctgtaagtttcttaactgcattttgatgaattcacattatgtaactataagaattgtcccaaaagtacctgtacagaaaattgaatattgaaaaattgacaaattgtgtacaaacactaaaaaaaacttgtttaaattgtatttgcaataaacaacatcaaattttttcatgaaatcttggtacaaattcagatctcttatttaaaatttaaataaggaatacattttcaaaatgcagtaatcaaaatgtgatctagtgtaatgaaataaaatgtgatctagtgtaatggaagacctttgagaacctgggtgtattaactttgtgtatatagtgtaaatatccccactgtactgttagaggccaacaattctagtatggcttgttggcaaagagtgctacaccgtttcaatgaaacaatgtatgtttgttttaactgaactaaaataaatacatgcttaatcctgaaaaaaaaaaaaaaaaaaaaaaaaaaaaaaaaaaaaaaaaaaaaaaaaaaaaaaaaaaaaaaaaaaaaaaaaaaaaaa

SEQ ID NO: 262 - DNA, 3866 bp, Homo sapiens
gagttctgctccggcgcccccgagcaccgcccgcttcagccgaccagccccgtcggctactgggcctcgccgagacgagaggagggaaaggcctcggcggccgcgaggaggcggcgggggcgcgggcggaggcggcgcgggcggccgcggctgccgctttgttgtgcggcccgggccgaggaaggagaagtgggaggaggggggagctcggcgtcccgctccctccgcggctcatggcgacgactctcggcacatccgggaccctccggccgtggcggccgaggcgccggctgctcgggccccagccccggccgctgtggtgactccgccgcgcctcgccgtcgcccccgtgccgcccgccgcccccgccgcccccgccgccggggacatgtctaaccccggaggccggaggaacgggcccgtcaagctgcgcctgacagtactctgtgcaaaaaacctggtgaaaaaggattttttccgacttcctgatccatttgctaaggtggtggttgatggatctgggcaatgccattctacagatactgtgaagaatacgcttgatccaaagtggaatcagcattatgacctgtatattggaaagtctgattcagttacgatcagtgtatggaatcacaagaagatccataagaaacaaggtgctggatttctcggttgtgttcgtcttctttccaatgccatcaaccgcctcaaagacactggttatcagaggttggatttatgcaaactcgggccaaatgacaatgatacagttagaggacagatagtagtaagtcttcagtccagagaccgaataggcacaggaggacaagttgtggactgcagtcgtttatttgataacgatttaccagacggctgggaagaaaggagaaccgcctctggaagaatccagtatctaaaccatataacaagaactacgcaatgggagcgcccaacacgaccggcatccgaatattctagccctggcagacctcttagctgctttgttgatgagaacactccaattagtggaacaaatggtgcaacatgtggacagtcttcagatcccaggctggcagagaggagagtcaggtcacaacgacatagaaattacatgagcagaacacatttacatactcctccagacctaccagaaggctatgaacagaggacaacgcaacaaggccaggtgtatttcttacatacacagactggtgtgagcacatggcatgatccaagagtgcccagggatcttagcaacatcaattgtgaagagcttggtccattgcctcctggatgggagatccgtaatacggcaacaggcagagtttatttcgttgaccataacaacagaacaacacaatttacagatcctcggctgtctgctaacttgcatttagttttaaatcggcagaaccaattgaaagaccaacagcaacagcaagtggtatcgttatgtcctgatgacacagaatgcctgacagtcccaaggtacaagcgagacctggttcagaaactaaaaattttgcggcaagaactttcccaacaacagcctcaggcaggtcattgccgcattgaggtttccagggaagagatttttgaggaatcatatcgacaggtcatgaaaatgagaccaaaagatctctggaagcgattaatgataaaatttcgtggagaagaaggccttgactatggaggcgttgccagggaatggttgtatctcttgtcacatgaaatgttgaatccatactatggcctcttccagtattcaagagatgatatttatacattgcagatcaatcctgattctgcagttaatccggaacatttatcctatttccactttgttggacgaataatgggaatggctgtgtttcatggacattatattgatggtggtttcacattgcctttttataagcaattgcttgggaagtcaattaccttggatgacatggagttagtagatccggatcttcacaacagtttagtgtggatacttgagaatgatattacaggtgttttggaccataccttctgtgttgaacataatgcatatggtgaaattattcagcatgaacttaaaccaaatggcaaaagtatccctgttaatgaagaaaataaaaaagaatatgtcaggctctatgtgaactggagatttttacgaggcattgaggctcaattcttggctctgcagaaaggatttaatgaagtaattccacaacatctgctgaagacatttgatgagaaggagttagagctcattatttgtggacttggaaagatagatgttaatgactggaaggtaaacacccggttaaaacactgtacaccagacagcaacattgtcaaatggttctggaaagctgtggagttttttgatgaagagcgacgagcaagattgcttcagtttgtgacaggatcctctcgagtgcctctgcagggcttcaaagcattgcaaggtgctgcaggcccgagactctttaccatacaccagattgatgcctgcactaacaacctgccgaaagcccacacttgcttcaatcgaatagacattccaccctatgaaagctatgaaaagctatatgaaaagctgctaacagccattgaagaaacatgtggatttgctgtggaatgacaagcttcaaggatttacccaggactctatttatacaaccctgactgacagcctcctttcagcagagtttcaaagaatatgctgaaatacaggaaaacactccccccccccccctttttttttttttttttacattttaggacactgtgaggggaaaggacaattttgaaattccttttcaaggaaaaaaaaggtctttatgctttgccatgaggccacattcagctgctatttaaacttaatatcttgaacctaaagaatgctgacttttcctacatttccagagttaggcagtattctacacttaaagactactactatttttataaaaggtaatctattcaaatttcttcacagatttcaagtctctcaaacatcaagacaacttcagcagtcggtacaagtcacatttcattttgattgaatacatgatcttgaacagctcctgtacttgctctttgtaaaaaaaaataaaattattttgaattattctacctttgtaaacaattggctaaaagaatcatctttaagaaattaagccatttacatgtttgtgtttttctatagcagagcattatattttgcattatatgtttcaacctagtctaagtgggtcttttttacatttttcaagaacggatttcctggaatacagcgatataattttggttgtcaaattcctaatgcaaccatttagtctaaacttagtcatttatttgtgacaataagatgtgttcaggggctccctgtttttaagagactcttttaaaaaaaaaaaaacctaatgtttttatcttgagtcaatatgattaggtattttggatttacttttaatcttaaaatactgcatttttatagcttctcagagcatgtggatgggatgggattttcgttattttgctgggtcagcttatctttaatatatggactattcctataaaccaaagtctctgacaagtgcacctaatttatattgtattttaactacagtgtaagtttccattaacaaaaccatcctaaagcgttaactgctcataattttaatcagctacagttatgaaaaaggaagaattttgctctaaagattattaataagcttagaaaatcctgcttttacctaacagaatgaagtggggttgaggggcggtagtatgaacagtgattctaactctatggcgtaaattactttgaagagttcattttggaagtaagggaatcccgcttcccttgg

SEQ ID NO: 263 - DNA, 3979 bp, Homo sapiens
agcaagggcctccctcccccgcatcacgtgatctcagctccttttcagctagtgggtggaaccccaggagggaaaactcagggaagcccagggcccgtgttgtgcttttggcccaggtaggtggacagacatgtcccaggcgggggacgtagaaggccccagcacaggagaccctgtgctcagtccccaacacaactgtgagcttttacagaacatggaaggagccagctccatgccaggcctgtcaccagatgggccgggagcaagctctgggcccggagtcagggctggcagcagaaggaagatccccaggaaggaggcccttcgaggtggcagctcccgggctgcaggtgctgctgaggtccggccaggggtcttggagctgctagctgtggtacagagccggggctcgatgctggctcctgggctccacatgcagctgccctcggtgcctactcaggggagagctctgacctccaagaggctccaggtttctctgtgtgacatcttagatgacagttgccccaggaaactttgtagcaggtctgctggcctcccagagagagctctggcctgcagggagaggcttgcaggagtggaggaggtgagctgcctcaggcccagggaggccagagacggtggaatgagttctccagggtgtgacagaagaagccccacactcagcaaagaggagccccctggaaggcccctgacatcctcaccagacccagtccctgtgagggtaagaaagaaatggaggaggcaaggggctcattcagagtgtgaggaaggggctggtgacttcctgtggcttgatcagagccctcgtggggacaacctcctgtctgtgggagaccctccccaagttgctgacctggagtccttgggaggcccttgcagacctccctctccaaaagacactgggtctgggcctggagagccaggtggaagtggggcaggatgtgcctcagggactgagaaatttggatatttgcccgctacaggggatgggccccagccaggcagcccctgtggccctgtcgggttcccagtgcccagtggaggggagtccctcagttcagctgcacaggctcctccacagagcgcagcactgtgcctgggggcgtcagcacaggcctctgcagagcagcaagaagctgtgtgtgtcgtgcggactggcagcgatgaaggccaggctccagcacaggaccaggaggagctggaggccaaggctcagccagcttccaggggaaggctggagcaaggactcgctgcccccgctgacacctgtgccagctcccgggagcccttgggcggcctcagctcctccctggatactgaagccagcagggcctgctcaggcccattcatggagcagagaagatccaagggcactaagaacctgaagaaaggtccagtgccctgtgcccaagaccggggcacagacagaagctcagacaactcccaccaggacaggccagaggaacccagcccaggaggctgccccagactggaggaagtgaaaataccccatggagtgaagcttgtgtgctacctgggttccgggccagtgatccagctcctgggggccatcagccacggccaggcaggggggcagctgccaccaaagctggaggttctagaggacttgatggaggtcagctcaccctcacctgcccagaggctcagaaggaagaaaaggcccatggtgcagggccctgctgggtgccaggttttccagccttctccttcaggaggcacagcaggggaccctggtggcctctctgaccccttctaccctccaagaagcggttccctggcccttggcgaccccagctcggaccctgcatgttcccagagtggcccaatggaggctgaagaggattctcttccggagcagccagaggactcagctcagctccaacaggagaagccatccctgtatattggggtgcggggcactgttgtccgttccatgcaggaggtactatggactcgccttcgggagctcccagacccagtgctgagtgaggaggtggtggagggcattgctgctggcattgaggcagccctctgggacctgacacaaggcaccaatggccggtacaagaccaagtatcgcagcctgctgttcaacctgcgggaccccaggaacctggacttgtttctcaaagtggttcatggagatgtcaccccctacgacctggtgcggatgagctcgatgcagctggccccccaggagctggcccgctggcgggaccaggaggagaaaaggggcctgaatatcattgagcagcaacagaaggagccgtgcagacttccagcctccaaaatgacccacaagggcgaagtggagattcagcgggacatggaccagacactgaccctggaggatctggtgggaccgcagatgttcatggactgcagcccacaggccctgcccatcgcatcagaggacaccacggggcagcatgaccaccacttcttagaccccaactgccacatctgcaaggactgggagccctcgaatgagctgctaggctccttcgaagccgccaagagctgcggggacaatatcttccagaaagccctaagccaaactcctatgcctgctccagagatgcccaaaaccagggagttgtctcccacggaaccacaggacagggtccctccatctgggctccatgtgcctgctgcacccacaaaggccctgccctgcctgccaccctgggaaggtgttctggacatgttctccatcaagcggttccgggccagggcccagctggtctcgggacacagctgtcggcttgtccaggctctgcccaccgtgatccgctcggcaggctgcatcccctccaacattgtctgggaccttctggccagcatctgcccagccaaggccaaggacgtctgcgtggtcagactgtgcccacatggggcccgggacacccagaactgccgcctgctctactcatacctcaatgataggcagcgccacgggctggcctctgtggagcacatggggatggtcctgctgcccctgcctgccttccagcccctgcccaccaggctgcgccctttggggggcccaggcctttgggctcttcctgtctcccctctcctttccccaggtctggaggtcactcactcaagtctgttgctggctgtgctgctccccaaggaagggcttccagacacagcagggtccagcccctggttggggaaggttcaaaagatggtctccttcaacagtaaggtggagaagagatactatcagccagatgacaggaggccgaatgtgcccctgaagggcacccctcccccaggaggtgcctggcagcagagccagggcaggggcagtatagctccaaggggaatctctgcttggcagaggccccccagaggcagggggaggctctggccagagcctgaaaactggcagcatcctgggcgagggcagtggcccccagagccaggcttgcgccagtcccagcatccctattcagtagcaccagctggtcatggctttggccgtggccagcacttccacagggactcctgtccccaccaagccctgctccggcacctcgaatccctggcgaccatgagtcaccagctccaagccttactgtgcccccagaccaagagctccatcccccgccctctgcagcgtttgtctagcgcccttgcagctccagagccccctggcccagcccgtgactcctctttggggcctacagatgaagctggctctgagtgtcccttccctagaaaggcctgaccctccttacccaccagaacaggggttttgatgccctcactagtgttgaagcctgttccagagagaggtgggactgcaaggagaggatggtcagccctacccacctgccctgtttgaacttcctgtttgacaatgtttgctgttgattttttgttcaataaagaatttggtaaaattgggaaaaaaaaaaaaaaaaaa

SEQ ID NO: 264 - DNA, 1503 bp, Homo sapiens
gtgcagctgctggcctcgtagacaatcggctgtctccccagaagagggaaagaattgtgcagatgagaaagaggctctcagcgggagggaggcaggcgggcttgattgacacaggagagggctggctttttggagggctcttagcaacggccctggttgagccccctcagccatgagaaaatcaaatcaatgtgccattcttccaggcgcgaggcagcagcggctgcagttcaacatgaaaggaggcttcctccctgcctgctaattacctgctcttcccgatctcatcgtttctgcctttgcaaagtgctactgagaagggggaagaaacgtccgccacccatcccccttgctgcctgggggttcagacttgattgtgaaaccccattggcttcattggctccttgatttaaaccacgcccggctttctgccctctttgctgctgctgggccaggttgcccagccatatcccagccccgtctgcagggagccggaggctgctgctgctgctattgtgtggatgccgcgcgtgtcttctcttctttccagagatggctaacaggggcccgagctatggcttaagccgagaggtgcaggagaagatcgagcagaagtatgatgcggacctggagaacaagctggtggactggatcatcctgcagtgcgccgaggacatagagcacccgccccccggcagggcccattttcagaaatggttaatggacgggacggtcctgtgcaagctgataaatagtttatacccaccaggacaagagcccatacccaagatctcagagtcaaagatggcttttaagcagatggagcaaatctcccagttcctaaaagctgcggagacctatggtgtcagaaccaccgacatctttcagacggtggatctatgggaagggaaggacatggcagctgtgcagaggaccctgatggctttaggcagcgttgcagtcaccaaggatgatggctgctatcggggagagccatcctggtttcacaggaaagcccagcagaatcggagaggcttttccgaggagcagcttcgccagggacagaacgtaataggcctgcagatgggcagcaacaagggagcctcccaggcgggcatgacagggtacgggatgcccaggcagatcatgtaggacgcggcatcctgcccctggtagagaggacgaatgttccacaccatggtctctacgaaaaagaaatagttagtcaccttctgaccttctcctctttctcaaagccttctgtccctggtttttgcaagtgctgcatttccgccgagaatccgcgttgcctactgctgccacctcctgttcatttagaactatgcaaagactccgcttccgttttcctgagctcctcgggccccagagtctctgtttgattatttatttatttatttatttatttgccaaaaattctcctcttcaacttatagaatgcacctaataaagtaattagtcttgtgtcttaaaaaaaaaaaaaaa

SEQ ID NO: 265 - DNA, 7253 bp, Homo sapiens
agccgctgcgcccgagctggcctgcgagttcagggctcctgtcgctctccaggagcaacctctactccggacgcacaggcattccccgcgcccctccagccctcgccgccctcgccaccgctcccggccgccgcgctccggtacacacaggatccctgctgggcaccaacagctccaccatggggctggcctggggactaggcgtcctgttcctgatgcatgtgtgtggcaccaaccgcattccagagtctggcggagacaacagcgtgtttgacatctttgaactcaccggggccgcccgcaaggggtctgggcgccgactggtgaagggccccgacccttccagcccagctttccgcatcgaggatgccaacctgatcccccctgtgcctgatgacaagttccaagacctggtggatgctgtgcgggcagaaaagggtttcctccttctggcatccctgaggcagatgaagaagacccggggcacgctgctggccctggagcggaaagaccactctggccaggtcttcagcgtggtgtccaatggcaaggcgggcaccctggacctcagcctgaccgtccaaggaaagcagcacgtggtgtctgtggaagaagctctcctggcaaccggccagtggaagagcatcaccctgtttgtgcaggaagacagggcccagctgtacatcgactgtgaaaagatggagaatgctgagttggacgtccccatccaaagcgtcttcaccagagacctggccagcatcgccagactccgcatcgcaaaggggggcgtcaatgacaatttccagggggtgctgcagaatgtgaggtttgtctttggaaccacaccagaagacatcctcaggaacaaaggctgctccagctctaccagtgtcctcctcacccttgacaacaacgtggtgaatggttccagccctgccatccgcactaactacattggccacaagacaaaggacttgcaagccatctgcggcatctcctgtgatgagctgtccagcatggtcctggaactcaggggcctgcgcaccattgtgaccacgctgcaggacagcatccgcaaagtgactgaagagaacaaagagttggccaatgagctgaggcggcctcccctatgctatcacaacggagttcagtacagaaataacgaggaatggactgttgatagctgcactgagtgtcactgtcagaactcagttaccatctgcaaaaaggtgtcctgccccatcatgccctgctccaatgccacagttcctgatggagaatgctgtcctcgctgttggcccagcgactctgcggacgatggctggtctccatggtccgagtggacctcctgttctacgagctgtggcaatggaattcagcagcgcggccgctcctgcgatagcctcaacaaccgatgtgagggctcctcggtccagacacggacctgccacattcaggagtgtgacaagagatttaaacaggatggtggctggagccactggtccccgtggtcatcttgttctgtgacatgtggtgatggtgtgatcacaaggatccggctctgcaactctcccagcccccagatgaacgggaaaccctgtgaaggcgaagcgcgggagaccaaagcctgcaagaaagacgcctgccccatcaatggaggctggggtccttggtcaccatgggacatctgttctgtcacctgtggaggaggggtacagaaacgtagtcgtctctgcaacaaccccacaccccagtttggaggcaaggactgcgttggtgatgtaacagaaaaccagatctgcaacaagcaggactgtccaattgatggatgcctgtccaatccctgctttgccggcgtgaagtgtactagctaccctgatggcagctggaaatgtggtgcttgtccccctggttacagtggaaatggcatccagtgcacagatgttgatgagtgcaaagaagtgcctgatgcctgcttcaaccacaatggagagcaccggtgtgagaacacggaccccggctacaactgcctgccctgccccccacgcttcaccggctcacagcccttcggccagggtgtcgaacatgccacggccaacaaacaggtgtgcaagccccgtaacccctgcacggatgggacccacgactgcaacaagaacgccaagtgcaactacctgggccactatagcgaccccatgtaccgctgcgagtgcaagcctggctacgctggcaatggcatcatctgcggggaggacacagacctggatggctggcccaatgagaacctggtgtgcgtggccaatgcgacttaccactgcaaaaaggataattgccccaaccttcccaactcagggcaggaagactatgacaaggatggaattggtgatgcctgtgatgatgacgatgacaatgataaaattccagatgacagggacaactgtccattccattacaacccagctcagtatgactatgacagagatgatgtgggagaccgctgtgacaactgtccctacaaccacaacccagatcaggcagacacagacaacaatggggaaggagacgcctgtgctgcagacattgatggagacggtatcctcaatgaacgggacaactgccagtacgtctacaatgtggaccagagagacactgatatggatggggttggagatcagtgtgacaattgccccttggaacacaatccggatcagctggactctgactcagaccgcattggagatacctgtgacaacaatcaggatattgatgaagatggccaccagaacaatctggacaactgtccctatgtgcccaatgccaaccaggctgaccatgacaaagatggcaagggagatgcctgtgaccacgatgatgacaacgatggcattcctgatgacaaggacaactgcagactcgtgcccaatcccgaccagaaggactctgacggcgatggtcgaggtgatgcctgcaaagatgattttgaccatgacagtgtgccagacatcgatgacatctgtcctgagaatgttgacatcagtgagaccgatttccgccgattccagatgattcctctggaccccaaagggacatcccaaaatgaccctaactgggttgtacgccatcagggtaaagaactcgtccagactgtcaactgtgatcctggactcgctgtaggttatgatgagtttaatgctgtggacttcagtggcaccttcttcatcaacaccgaaagggacgatgactatgctggatttgtctttggctaccagtccagcagccgcttttatgttgtgatgtggaagcaagtcacccagtcctactgggacaccaaccccacgagggctcagggatactcgggcctttctgtgaaagttgtaaactccaccacagggcctggcgagcacctgcggaacgccctgtggcacacaggaaacacccctggccaggtgcgcaccctgtggcatgaccctcgtcacataggctggaaagatttcaccgcctacagatggcgtctcagccacaggccaaagacgggtttcattagagtggtgatgtatgaagggaagaaaatcatggctgactcaggacccatctatgataaaacctatgctggtggtagactagggttgtttgtcttctctcaagaaatggtgttcttctctgacctgaaatacgaatgtagagatccctaatcatcaaattgttgattgaaagactgatcataaaccaatgctggtattgcaccttctggaactatgggcttgagaaaacccccaggatcacttctccttggcttccttcttttctgtgcttgcatcagtgtggactcctagaacgtgcgacctgcctcaagaaaatgcagttttcaaaaacagactcagcattcagcctccaatgaataagacatcttccaagcatataaacaattgctttggtttccttttgaaaaagcatctacttgcttcagttgggaaggtgcccattccactctgcctttgtcacagagcagggtgctattgtgaggccatctctgagcagtggactcaaaagcattttcaggcatgtcagagaagggaggactcactagaattagcaaacaaaaccaccctgacatcctccttcaggaacacggggagcagaggccaaagcactaaggggagggcgcatacccgagacgattgtatgaagaaaatatggaggaactgttacatgttcggtactaagtcattttcaggggattgaaagactattgctggatttcatgatgctgactggcgttagctgattaacccatgtaaataggcacttaaatagaagcaggaaagggagacaaagactggcttctggacttcctccctgatccccacccttactcatcacctgcagtggccagaattagggaatcagaatcaaaccagtgtaaggcagtgctggctgccattgcctggtcacattgaaattggtggcttcattctagatgtagcttgtgcagatgtagcaggaaaataggaaaacctaccatctcagtgagcaccagctgcctcccaaaggaggggcagccgtgcttatatttttatggttacaatggcacaaaattattatcaacctaactaaaacattccttttctcttttttcctgaattatcatggagttttctaattctctcttttggaatgtagattttttttaaatgctttacgatgtaaaatatttattttttacttattctggaagatctggctgaaggattattcatggaacaggaagaagcgtaaagactatccatgtcatctttgttgagagtcttcgtgactgtaagattgtaaatacagattatttattaactctgttctgcctggaaatttaggcttcatacggaaagtgtttgagagcaagtagttgacatttatcagcaaatctcttgcaagaacagcacaaggaaaatcagtctaataagctgctctgccccttgtgctcagagtggatgttatgggattctttttttctctgttttatcttttcaagtggaattagttggttatccatttgcaaatgttttaaattgcaaagaaagccatgaggtcttcaatactgttttaccccatcccttgtgcatatttccagggagaaggaaagcatatacacttttttctttcatttttccaaaagagaaaaaaatgacaaaaggtgaaacttacatacaaatattacctcatttgttgtgtgactgagtaaagaatttttggatcaagcggaaagagtttaagtgtctaacaaacttaaagctactgtagtacctaaaaagtcagtgttgtacatagcataaaaactctgcagagaagtattcccaataaggaaatagcattgaaatgttaaatacaatttctgaaagttatgttttttttctatcatctggtataccattgctttatttttataaattattttctcattgccattggaatagatatctcagattgtgtagatatgctatttaaataatttatcaggaaatactgcctgtagagttagtatttctatttttatataatgtttgcacactgaattgaagaattgttggttttttcttttttttgttttgtttttttttttttttttttttgcttttgacctcccatttttactatttgccaatacctttttctaggaatgtgcttttttttgtacacatttttatccattttacattctaaagcagtgtaagttgtatattactgtttcttatgtacaaggaacaacaataaatcatatggaaatttatatttatacttactgtatccatgcttatttgttctctactggctttatgtcatgaagtatatgcgtaaataccattcataaatcaatatagcatatacaaaaataaattacagtaagtcatagcaacattcacagtttgtatgtgattgagaaagactgagttgctcaggcctaggcttagaatttgctgcgtttgtggaataaaagaacaaaatgatacattagcctgccatatcaaaaacatataaaagagaaattatccctaagtcaagggcccccataagaataaaatttcttattaaggtcattagatgtcattgaatccttttcaaagtgcagtatgaaaacaaagggaaaaacactgaagcacacgcaactctcacagcgacattttctgacccacgaatgatgccttgggtgggcaacacgattgcatgttgtggagacacttcggaagtaaatgtggatgagggaggagctgtccttgcaatgttgagccaagcattacagatacctcctcttgaagaaggaataataagtttaatcaaaaaagaagactaaaaaatgtaaaatttggaaggaatccataaatgcgtgtgtgtctaaatacaaattatcatgtgaagaaaaggcccaagtgtaccaataagcagaccttgatttttggatgggctaattatgaatgtggaatactgaccagttaatttccagttttaatgaaaacagatcaaagaagaaattttatgagtaggttaaaggtctggctttgaggtctattaaacactagaaaggactggctgggtgagataaaatcttccttgttgattttcactctcattctataaatactcatctttctgagtagccatgatcacatacaaatgtaaattgccaaatcattttatagtaccaaggtgaagaagcaggaactagaaagtgttgataatagctgtggagttaggaaaactgatgtgaaggaaataattctttgaaatggcaaagaattaaataccatcattcattatcagaagagttcaacgtttgaagtgctgggagataattctaattcattcttggatagtgaagcaaaactgattgaaaataccaagataagacagaaaaagtgactggaaagaggagcttttcttccaggcatgttccagtttcaccctaagactgaccttcaaataatcaggttgtactgaaataaaggacttgttaaaaattaaaattatgtcatcgagatgatagcttttttcctcctccaacagtttattgtcatgtgttgtgggagagctcgagtgaagagcaataaactccaggtcttataagaatgtacatacaataaaggtggtgccagcagtttttttttttctaaagagtcacatgtagaaaagcctccagtattaagctcctgaattcattccttaaataaattggctctctctctcttctataaaaaaaaaaaaaa

SEQ ID NO: 266 - DNA, 6540 bp, Homo sapiens
cggcccagccgagccgggctgcttgtctggccggcggaggctgagcgcgaccctagcaagccgcggcgcccgccgaccagggacaagagcgactcctgggaccccactctgccccgcgccgccgcctcctcccctgttgtcgcggggacgctcaggcccgcgccgcccgggccacgattctcctcctctttctcccggaggggaaggaacggagaaagccgagcggcggctccgggagagagcgagccgaggcccctgcccccgaggctcggggcaggaggaggaggaggaggaggaggcggaggcggagggaagtgcgcgtcactctcgggaggagagtatttcacctccaggcagaggctgcggctgccagttgagtacgagcggcagctgcgggcgccggcaatcgagtggcttcctggccatggagaggagatctggacccgaggacgccagggactcctctccgtctccctggaccgctgtgtaggcacctgagttaacggacgctaagcggggtaggggaagtaacagtgtatcatgtatgccactgattccaggggacactcccctgctttcctccaacctcagaatggaaatagtcgtcacccatctggctatgttccagggaaggttgtcccattgcgtccccctcctcctccaaagagtcaagcttcagccaaatttacctccatcagacgagaagaccgggcaaccttcgcattctcacctgaagaacagcaagcccagagagaaagtcaaaagcaaaagagacacaaaaatactttcatttgttttgctattactagtttctcattttttattgcacttgcaatcattttaggaatatcctcaaaatatgctccagatgaaaattgcccagatcaaaatcctcgtctcaggaattgggatccaggacaagattctgcaaagcaagttgttatcaaggagggagatatgctccgtctgacctcagacgccaccgtgcattctatagtcattcaggatggaggactgcttgtatttggggacaataaagatggatccagaaatattactttgaggactcattacatcctgatccaggatggtggggcgcttcatattggagcagaaaaatgccgctataaatccaaagcgacaattaccttgtatggcaagtcagatgaaggtgaaagtatgccaacatttggcaaaaagtttattggtgtggaagctggcgggacactggagttacatggggcacggaaggcatcgtggacgttgttggcaaggaccctgaattcctcaggcttgccctttgggtcctatacctttgaaaaggacttttcccggggcctcaatgtgagggtcattgaccaagacacggccaaaattttggaaagtgagagatttgatacccatgaataccgcaatgagagcaggcggcttcaggagtttctgagattccaggatccaggtcggattgttgccatagctgtcggggattcagccgctaaaagtctcttacaaggaaccatccagatgatccaggaacggttgggaagtgaactgatccaaggactgggctacaggcaagcttgggctttagttggtgtcattgatggtggaagcacttcttgcaatgaatccgtgagaaactatgaaaatcatagcagtggcgggaaggctcttgcccaaagagaattttatactgtggatggccagaagttctctgtgacagcttatagtgaatggattgaaggcgtttctctttcaggattccgggtagaggttgtagatggagtgaagctaaatttgctagatgatgttagtagttggaaacctggagaccagattgtggtcgcaagcacagactattccatgtaccaagcagaggagttcactcttcttccctgttctgaatgcagccattttcaggtcaaagtcaaagaaacccctcagttcctgcacatgggtgagatcatagacggtgtagacatgagagctgaggttggaattcttacccggaatattgtgatccaaggagaagtggaggactcatgctacgcagaaaatcagtgccaattttttgattatgatacctttgggggacacattatgataatgaaaaattttacttcagtccatctttcttatgtggaattgaaacacatgggtcagcagcagatggggcgataccctgttcattttcacctgtgtggtgacgtggattataaaggaggatacagacatgcaacatttgtggacggcctgtctattcatcacagcttctcaaggtgcatcactgtgcatgggacaaatggcttgctaataaaagacaccattgggtttgacacactaggtcattgtttctttttggaagatggtattgaacagaggaatactttgttccacaatctgggactcctcaccaagccgggtactctcctgcccaccgataggaacaactccatgtgtaccaccatgcgagataaagtgtttggaaattacattcctgtgcctgctactgactgtatggctgtttcaactttctggattgctcatcccaacaataatctgattaataatgcagctgcaggctcacaggatgctggaatatggtatttattccacaaggaaccaactggggaatccagtggattgcagctcttggcaaaaccagaactcactccattgggtatattttataacaacagggtccattcaaattttaaggctggcttatttattgacaaaggtgtcaaaacaaccaactctagtgctgctgacccaagggaatacctctgtttggacaatagtgcaagatttcgacctcatcaggatgcaaaccccgaaaaaccacgtgttgctgctctaattgacaggctcattgcttttaaaaataatgataatggagcttgggtcagaggaggagatattatcgttcaaaattcagcatttgcagataatggaataggactgacctttgccagtgatggaagcttcccaagtgatgaaggttccagccaagaggtatctgaatctctctttgttggggagagcaggaattacggctttcagggtggtcagaacaagtatgtaggcactggaggaatagaccagaagcctcgaacattacccaggaacaggacgttcccaattagaggctttcagatttatgatgggcccattcatctcacaaggagcactttcaaaaaatatgtgccaactccagataggtacagcagtgcaattggcttcctcatgaagaattcctggcagataacccccaggaataatatctccctcgtgaagtttggtccacatgtctctctgaatgtcttttttggaaagcctggtccctggtttgaagattgtgagatggatggtgataagaactccatattccatgacattgatggctctgtgacaggatacaaggatgcttatgtgggaagaatggacaactacctgatccgccatccaagctgtgtaaatgtgtctaagtggaatgcagtgatctgcagtgggacctatgcacaggtctatgtacagacatggagcactcagaatctttctatgaccattacacgagatgagtatccgtccaaccctatggtgctccgaggtattaatcagaaggctgcctttccacagtaccagcctgtcgtcatgctggagaagggttataccatccactggaatgggccggcaccacggactacatttctatacctcgtcaacttcaacaagaatgactggattcgagttggcctttgctatccatcaaacacaagttttcaagttacctttggctatttgcagcggcagaatggctcattatccaaaatcgaagaatatgagcctgtgcattcactggaagaactgcaaagaaagcaatccgagaggaaattctattttgactccagcacggggttactgtttttgtatctcaaagccaaaagccacaggcatggccacagttactgttcatctcagggatgtgaaagagtcaagatccaagcagccacagactcaaaggacatcagtaactgcatggccaaagcatacccacagtactacagaaagccgtcagtggtcaagcggatgccggccatgctcactggactctgtcaaggctgtggcactcggcaggtggtgtttactagtgatcctcataaaagttacctccctgtgcaattccagtcacctgataaagcagaaacccagcgtggagacccgtctgttatttctgtcaatggcactgactttaccttccgaagtgcaggcgtcctcctccttgttgtggatccgtgcagcgttccattccgcttgacggaaaaaacggtttttcctcttgctgatgtcagtcgcattgaagagtatttaaaaacaggcatccctccaaggtccattgttctgttgagcacaagaggagaaataaagcagttaaacatttcacacttactagtacctctgggattagccaaaccagctcatctttatgacaaagggagtaccatatttttgggattcagtggaaactttaaaccatcatggactaagctatttaccagtcctgctggacagggccttggggtgcttgaacaattcatacctttgcagctggacgaatatggttgtcccagagccaccactgtccgcagaagagacctggaactgctaaagcaagcttcaaaagcacattagagactaactgtaacttaagtgctgggggaaaaaaaatgtgaactaacttatttaatttatggcattttaaaatgacactgttaacccaacggaaccattttccagtttgatacagaatggggagaaaagaaagcgtttgaaattattgcttggataccagcttcatgcaccttctagttgtacaaaatgttaaagacgttgtttgtatttgtaaggctggtgtattcagagagcagatctcttattcctcactttccacccccgtattttgtaatgaccatgagcaatgtttttactttttgtataatggggtggggtggagtgggggcttctgagagtcagcctgaggtctttagaggaccagctattgtagcaccttggatacttgaagtttaatgctcagttgggtcgggtggcagttgacttggtggctggcatgttcagcagtgcctggggccctgtttctgggcagcctttgaggattttctatgatattgaatgacagttttaagtggcaactcaggcccagctcatgcccttttttgcctggacatgtgctatttttattcacttatatatcaattacttgtaagggttaaactttcaaacaggaagtatattgggacaaaagggctcttggggattagatatccctttaatctgtgaccattgggcaaaaaattttcctgcagcaaaagtctgaggctgttgggaccatttttgcagctttaatccttagcctcttttgactgtatatttgtgtttaaaatgcagagctcaactgaatatttccttttttgttttgttttgttttgttttaagaagtaggttgttttcctgaaccgtaaacttgtatcattttaacttgcacaaaggaagtctgttcttggtattgctcttgcacttgggttttttgttattgttttgtgtggattttttaaagcttttctgttcaccctcctgccaggaaaatcccagaaagcttaatgataccccaaaatgattacacccagggaggaaaaaaaggagcgctttctagggtcagaatcgtggagagaatactcagaaatgaacctctttaaagccttgcaggaatgagtcactcttacttaatgaaatgttaaagccaattaaaaagcatgctgtgatgcccagcttccctttccacagggtgcatgcgtctcctgctggtgaatcacatgcggcaagaggcaactggctccacagcctgggatgctgccgtaccaagaggaaagaagcagcaaaatgcctttacgttgttctaaacccccgacgcataaagtgtagaggagggatggccaagggtgggtggtagaaagtgtgttcaggctgacactggcaatgagtacagataatttcactttcctcttctaggggcaaaggctgatggcctctacctttgtatccaggagaaactgcagagcagccctgtgactttacaaaatatgctacctcaaagtgctaccgataaacctttctaattgtaagtgcccttactaagggcacatgtcttaatcaaagttagttttttgttttctggtttgttttttttttttgtatattgatgaatgagatcttacctattaaatatattattggattatggttcctgaaggtcattagagtgtgtgtgtgtgtgtgtgtgtgtgtgtgtgttttatgacttaaatatctttacgtgtgttttttagagcttggttctttaaagatttggagaagatatgtaaattaccaaggcacttggtttttctgttttatatactaataatcagggcctaagttaaataaaaatatgtgtgcatgtattttaaaaaaaaaaaaaaaaaa

SEQ ID NO: 267 - DNA, 4705 bp, Homo sapiens
ctttggaaagtcccgtggaaatccccgggcctacaacccgcatacaactgaaacggggcaaagcagactgcgcagtctgcagtcttcgtggcgggccaagcgagcttggagcccgcgggggcggagcggtgagagcggccgccaagagagatcacacccccagccgaccctgccagcgagcgagcccgaccccaggcgtccatggagcgtcgcctccgcccggtccctgccccgacccccgcctgcggcgcgctcctgccttgaccaggacttgggactttgcgaaaggatcgcggggcccggagaggtgttggagagcacaatggctgaacaagtccttcctcaggctttgtatttgagcaatatgcggaaagctgtgaagatacgggagagaactccagaagacatttttaaacctactaatgggatcattcatcattttaaaaccatgcaccgatacacactggaaatgttcagaacttgccagttttgtcctcagtttcgggagatcatccacaaagccctcatcgacagaaacatccaggccaccctggaaagccagaagaaactcaactggtgtcgagaagtccggaagcttgtggcgctgaaaacgaacggtgacggcaattgcctcatgcatgccacttctcagtacatgtggggcgttcaggacacagacttggtactgaggaaggcgctgttcagcacgctcaaggaaacagacacacgcaactttaaattccgctggcaactggagtctctcaaatctcaggaatttgttgaaacggggctttgctatgatactcggaactggaatgatgaatgggacaatcttatcaaaatggcttccacagacacacccatggcccgaagtggacttcagtacaactcactggaagaaatacacatatttgtcctttgcaacatcctcagaaggccaatcattgtcatttcagacaaaatgctaagaagtttggaatcaggttccaatttcgcccctttgaaagtgggtggaatttacttgcctctccactggcctgcccaggaatgctacagataccccattgttctcggctatgacagccatcattttgtacccttggtgaccctgaaggacagtgggcctgaaatccgagctgttccacttgttaacagagaccggggaagatttgaagacttaaaagttcactttttgacagatcctgaaaatgagatgaaggagaagctcttaaaagagtacttaatggtgatagaaatccccgtccaaggctgggaccatggcacaactcatctcatcaatgccgcaaagttggatgaagctaacttaccaaaagaaatcaatctggtagatgattactttgaacttgttcagcatgagtacaagaaatggcaggaaaacagcgagcaggggaggagagaggggcacgcccagaatcccatggaaccttccgtgccccagctttctctcatggatgtaaaatgtgaaacgcccaactgccccttcttcatgtctgtgaacacccagcctttatgccatgagtgctcagagaggcggcaaaagaatcaaaacaaactcccaaagctgaactccaagccgggccctgaggggctccctggcatggcgctcggggcctctcggggagaagcctatgagcccttggcgtggaaccctgaggagtccactggggggcctcattcggccccaccgacagcacccagcccttttctgttcagtgagaccactgccatgaagtgcaggagccccggctgccccttcacactgaatgtgcagcacaacggattttgtgaacgttgccacaacgcccggcaacttcacgccagccacgccccagaccacacaaggcacttggatcccgggaagtgccaagcctgcctccaggatgttaccaggacatttaatgggatctgcagtacttgcttcaaaaggactacagcagaggcctcctccagcctcagcaccagcctccctccttcctgtcaccagcgttccaagtcagatccctcgcggctcgtccggagcccctccccgcattcttgccacagagctggaaacgacgcccctgctggctgcctgtctcaagctgcacggactcctggggacaggacggggacgagcaagtgcagaaaagccggctgcgtgtattttgggactccagaaaacaagggcttttgcacactgtgtttcatcgagtacagagaaaacaaacattttgctgctgcctcagggaaagtcagtcccacagcgtccaggttccagaacaccattccgtgcctggggagggaatgcggcacccttggaagcaccatgtttgaaggatactgccagaagtgtttcattgaagctcagaatcagagatttcatgaggccaaaaggacagaagagcaactgagatcgagccagcgcagagatgtgcctcgaaccacacaaagcacctcaaggcccaagtgcgcccgggcctcctgcaagaacatcctggcctgccgcagcgaggagctctgcatggagtgtcagcatcccaaccagaggatgggccctggggcccaccggggtgagcctgcccccgaagacccccccaagcagcgttgccgggcccccgcctgtgatcattttggcaatgccaagtgcaacggctactgcaacgaatgctttcagttcaagcagatgtatggctaaccggaaacaggtgggtcacctcctgcaagaagtggggcctcgagctgtcagtcatcatggtgctatcctctgaacccctcagctgccactgcaacagtgggcttaagggtgtctgagcaggagaggaaagataagctcttcgtggtgcccacgatgctcaggtttggtaacccgggagtgttcccaggtggccttagaaagcaaagcttgtaactggcaagggatgatgtcagattcagcccaaggttcctcctctcctaccaagcaggaggccaggaacttctttggacttggaaggtgtgcggggactggccgaggcccctgcaccctgcgcatcaggactgcttcatcgtcttggctgagaaagggaaaagacacacaagtcgcgtgggttggagaagccagagccattccacctcccctcccccagcatctctcagagatgtgaagccagatcctcatggcagcgaggccctctgcaagaagctcaaggaagctcagggaaaatggacgtattcagagagtgtttgtagttcatggtttttccctacctgcccggttcctttcctgaggacccggcagaaatgcagaaccatccatggactgtgattctgaggctgctgagactgaacatgttcacattgacagaaaaacaagctgctctttataatatgcaccttttaaaaaattagaatattttactgggaagacgtgtaactctttgggttattactgtctttacttctaaagaagttagcttgaactgaggagtaaaagtgtgtacatatataatatacccttacattatgtatgagggatttttttaaattatattgaaatgctgccctagaagtacaataggaaggctaaataataataacctgttttctggttgttgttggggcatgagcttgtgtatacactgcttgcataaactcaaccagctgcctttttaaagggagctctagtcctttttgtgtaattcactttatttattttattacaaacttcaagattatttaagtgaagatatttcttcagctctggggaaaatgccacagtgttctcctgagagaacatccttgctttgagtcaggctgtgggcaagttcctgaccacagggagtaaattggcctctttgatacacttttgcttgcctccccaggaaagaaggaattgcatccaaggtatacatacatattcatcgatgtttcgtgcttctccttatgaaactccagctatgtaataaaaaactatactctgtgttctgttaatgcctctgagtgtcctacctccttggagatgagatagggaaggagcagggatgagactggcaatggtcacagggaaagatgtggccttttgtgatggttttattttctgttaacactgtgtcctgggggggctgggaagtcccctgcatcccatggtaccctggtattgggacagcaaaagccagtaaccatgagtatgaggaaatctctttctgttgctggcttacagtttctctgtgtgctttgtggttgctgtcatatttgctctagaagaaaaaaaaaaaaggaggggaaatgcattttccccagagataaaggctgccattttgggggtctgtacttatggcctgaaaatatttgtgatccataactctacacagcctttactcatactattaggcacactttccccttagagccccctaagtttttcccagacgaatctttataatttctttccaaagataccaaataaacttcagtgttttcatctaattctcttaaagttgatatcttaatattttgtgttgatcattatttccattcttaatgtgaaaaaaagtaattatttatacttattataaaaagtatttgaaatttgcacatttaattgtccctaatagaaagccacctattctttgttggatttcttcaagtttttctaaataaatgtaacttttcacaagagtcaacattaaaaaataaattatttaagaacagaaaaaaaaaaaaaaaa

SEQ ID NO: 268 - DNA, 4857 bp, Homo sapiens
cccagcatccctggcgcggccatttcagccccatcttggcccagcggagggagctgcagccgccgcttcagcagtttgaatttcagtttcttcggggtttaggaattgggcgcaccgaggaggagccggagaagccaccaccgctacctcacacagccggggcgcctccggtcccgtgccagcggtctgccgccgccgcccctctctgagagaagccgcgaggggaggccgagaccgccgtcgccgcccgcccgcaggggtggttccccctgtaaggggaggaccgagccggctttcccctcccccagagcgggtttccgcctgaggcagtcgacatgtccctggggctgagctccggctagagccggggagggagggccgcctgcccgcgccacagccccaccgcccgcccgcggaccttcagccagctccggcccgcggctcccggctgaattaggcatctccgactccggactcgccgctccttccctcagtcagagagcccagcgctgacgccggcaccggcctgaggagcccgagcggggcagcaccgcccctcacgccgccgccaccgcctcctcctcctcctcttcgccctcccactcccacccccagccaaggcctgctgaccgcgccgagcgccgagctggactgaccacggctgcccggagacgagagaggaagcagccggcccgcccctgggttcgcgctctcgccgcctctgagggaattgaattgaggcgccgcggctgcgagagctaaaaaggaaggaggagccgccgcgggactgagacgggggcagagccgaagagaccgacacagagaaggaaacgaggaggaggatgtctcaccgggcggccagcgcctggatcagcccgtgactcttaacagcggcgggcctcagaccccagcgcagactcggactttgtctttgggggcccgtgctctgccctccccggtttccgacaggacccagaggagccggcgtgcctctctgccctccagccttcttcaccatgtccaagatgccggccaagaagaagagctgcttccagatcaccagtgtcaccacggcccaggtggccactagcatcaccgaggacaccgagagcttggacgacccggacgagtcacgcacagaggacgtctcctccgagattttcgacgtctctcgggccacggattatggccctgaggaggtctgcgagcgcagctcttccgaagagacgcttaacaatgttggggatgcggagactcccgggaccgtctccccaaacctcctcctagatgggcagctggcagcggcggctgctgctcccgccaacggaggaggagtcgtttcggcccggagcgtgtctggggcgctcgccagtaccctggcggcggctgccacttcggcccccgcccccggagcacccggcggcccccagctcgcgggctcatccgccgggccagtgactgcagccccatctcagcctcccaccacatgtagttcccgttttcgcgtgatcaagctggaccacgggagcggagagccctatagacgcggccgatggacgtgtatggaatactatgagagggattcagacagcagcgtcctgactagatccggggattgcattagacacagcagtacttttgaccagactgcggagcgggacagcggcctgggcgccaccggagggtcggtggtggtagtagtggcctccatgcagggggcgcacgggcccgagtcgggaactgacagctccttgactgctgtgtcacagctacccccgtcggagaaaatgagccagcccactccggcccagccgcagagttttagcgttgggcagccacagccgccgccgccacccgtaggtggggctgtggctcaaagctcggctccgctgccgccgttcccgggagccgcgaccgggccgcagccaatgatggcagccgcgcagcccagccagccccagggagcggggcccgggggacagactctgccgccgacgaatgtaaccctggcgcagccggctatgtccctgcctccgcagccgggccctgcagtgggcgcccccgcggcgcagcagccccagcagttcgcgtatcctcagcctcagataccgcccggacatttgctgcccgtccagccctccggccagagtgagtacctgcagcagcacgtggccggcctgcagccgccaagccccgcgcagccctcgtccaccggcgccgcagcgagccccgccacggcggccacccttcccgtgggcaccggccagaatgcttcctcggtgggcgcgcagctcatgggcgcgtcttcccagcccagcgaagccatggccccccggacgggaccagcgcaaggcgggcaggtcgcgccttgtcagccgactggagtgcccccggctactgtgggaggcgtggtgcagccgtgcctcggtcctgccggggctgggcagccccagtccgtgcctccgccgcagatgggtggcagtggtccgctgtcagccgtacctggtggccctcacgccgtggtgcccggagttccaaacgtgcctgcagccgtgcccgctccaagcgtgcctagtgtgtctaccacttctgttactatgccaaatgtacccgcgcctctggcccagtcgcaacagctgagcagccatacgccagtcagcaggagcagcagcataatccagcatgttgggctgcccttagcgccaggcacacacagcgcaccaacaagtctaccacagtctgacctaagccagtttcaaactcagacccagcctttagtcgggcaagtcgacgatactagaagaaaatcagaacccctacctcaaccaccactttctctcattgctgaaaataagcctgttgtgaagccgcctgttgcagattccctggcaaacccccttcagttaacacctatgaacagtctggccacctctgtattcagcatagctattcctgttgatggtgatgaagacaggaatccttcaactgctttctaccaagcgttccatttgaacacgttaaaggaatcaaagagcctctgggatagtgcatctgggggaggtgttgtagccattgacaacaaaatagaacaagcaatggatctggtgaaaagccatttgatgtatgcagtaagagaagaagtggaagttttaaaggaacaaataaaagaattagttgaaagaaactctttacttgaacgagaaaatgcactgttaaaatctctttcaagcaatgatcaattatcccaactcccaacccaacaggccaatcctggtagcacttctcaacagcaagcagtgatagcacagcctccgcagccaacgcaacctccacagcagccgaatgtctcctcagcataaagctttcttaagcctcattaagaaaaaaactgaaagcaatctatccttgtgtgccactggtgttctttccactttatacgaaagcaagtagccatgctttggttgtgtgtttggccttttcagtattagacaatcattctacaagagcttttcctctctctgagatgtcatgcagcgctgttgatgtccagttctatgtcatcagtacacaaggagaataatagatggggtttattaaagcgagcaaagtctgcattttacctggtgcgcatgagtggggtctttaagagttttggtggctctcccatgtttcctattacccatggatttaccctgagccttcctatcacattataaataacagttcatctaaagagccacttttctttctgattcagtaacatttgcctacataagttttcatttatttgtgttttatttattacagggctgctattttcataatgtacatgaacaatgtcacagaacttttttaatttttttgaataattataagtatcagtaaaggaagtgaaagacaggattgcatttaatagataaaacgtttaggcaataattgaacaaaagaatcctggcatatttctaacactaatggcaatttacttatggtatttattttcagtagtaaagacccagcttgaatgtaaattttgtatagtgtaagtatgaagaacatagtgcaactgtacaggtagtcaccagttattgtgatatgataaataattgggctattttgatgaagaaaactttgttcatttgtttctactttctaagagaaattgccacgattcctctgcttttcaacatttcgtatgacttttttttcgggtgggaataaaaagctgtgaaattgttcaacctactttgtaaccaaagaagcaaagctgtgtaatggagtttggtttttttttgttgtttttttttttttgtctttttttttttttataatgcacattctttatgtatttttatttagtgttttctcagtcacaattttctttactgtctagcatgatctgcatgacctataatctttgaaccactttcgtacctcatgtttttatccagcactcttattgtaatatgtactagtctgtgaacaatgtcaaataaaagagaacgaacaggtagtttggtggagctgagctagtgtacaatacactagttgtaaaaaaaaaaaaaaaaaaaagtgagccatcttttgttcatttaaaatggtgttttgaatttcgtatgcagaaaacgttttgttacattgcagattttaatgtatttaataaatgcaacatgcagattaagtgcagtgtatactgagtatttaaattaaaatgtacatttcataaatacagtttcaaaagaaagcatcattttgtgtatactaacacattaagtgtatgtcagaaattgatgtataaatatatattttaacattttctgaaattaaactgcagttttgttgaaaaaaaaaaaaaaaaaa

SEQ ID NO: 269 - DNA, 2979 bp, Homo sapiens
gtggctcttctggcccgggctactatatagagacgtttccgcctcctgcttgaaactaacccctctttttctccaaaggagtgcttgtggagatcggatcttttctccagcaattgggggaaagaaggctttttctctgaattagcttagtgtaaccagcggcgtatattttttaggcgccttttcgaaaacctagtagttaatattcatttgtttaaatcttattttatttttaagctcaaactgcttaagaataccttaattccttaaagtgaaataattttttgcaaaggggtttcctcgatttggagctttttttttcttccaccgtcatttctaactcttaaaaccaactcagttccatcatggtgatgttcaagaagatcaagtcttttgaggtggtctttaacgaccctgaaaaggtgtacggcagtggcgagaaggtggctggccgggtgatagtggaggtgtgtgaagttactcgtgtcaaagccgttaggatcctggcttgcggagtggctaaagtgctttggatgcagggatcccagcagtgcaaacagacttcggagtacctgcgctatgaagacacgcttcttctggaagaccagccaacaggtgagaatgagatggtgatcatgagacctggaaacaaatatgagtacaagttcggctttgagcttcctcaggggcctctgggaacatccttcaaaggaaaatatgggtgtgtagactactgggtgaaggcttttcttgaccgcccgagccagccaactcaagagacaaagaaaaactttgaagtagtggatctggtggatgtcaatacccctgatttaatggcacctgtgtctgctaaaaaagaaaagaaagtttcctgcatgttcattcctgatgggcgggtgtctgtctctgctcgaattgacagaaaaggattctgtgaaggtgatgagatttccatccatgctgactttgagaatacatgttcccgaattgtggtccccaaagctgccattgtggcccgccacacttaccttgccaatggccagaccaaggtgctgactcagaagttgtcatcagtcagaggcaatcatattatctcagggacatgcgcatcatggcgtggcaagagccttcgggttcagaagatcaggccttctatcctgggctgcaacatccttcgagttgaatattccttactgatctatgttagcgttcctggatccaagaaggtcatccttgacctgcccctggtaattggcagcagatcaggtctaagcagcagaacatccagcatggccagccgaaccagctctgagatgagttgggtagatctgaacatccctgataccccagaagctcctccctgctatatggatgtcattcctgaagatcaccgattggagagcccaaccactcctctgctagatgacatggatggctctcaagacagccctatctttatgtatgcccctgagttcaagttcatgccaccaccgacttatactgaggtggatccctgcatcctcaacaacaatgtgcagtgagcatgtggaagaaaagaagcagctttacctacttgtttctttttgtctctcttcctggacactcactttttcagagactcaacagtctctgcaatggagtgtgggtccaccttagcctctgacttcctaatgtaggaggtggtcagcaggcaatctcctgggccttaaaggatgcggactcatcctcagccagcgcccatgttgtgatacaggggtgtttgttggatgggtttaaaaataactagaaaaactcaggcccatccattttctcagatctccttgaaaattgaggccttttcgatagtttcgggtcaggtaaaaatggcctcctggcgtaagcttttcaaggttttttggaggctttttgtaaattgtgataggaactttggaccttgaacttacgtatcatgtggagaagagccaatttaacaaactaggaagatgaaaagggaaattgtggccaaaactttgggaaaaggaggttcttaaaatcagtgtttcccctttgtgcacttgtagaaaaaaaagaaaaaccttctagagctgatttgatggacaatggagagagctttccctgtgattataaaaaaggaagctagctgctctacggtcatctttgcttagagtatactttaacctggcttttaaagcagtagtaactgccccaccaaaggtcttaaaagccatttttggagcctattgcactgtgttctcctactgcaaatattttcatatgggaggatggttttctcttcatgtaagtccttggaattgattctaaggtgatgttcttagcactttaattcctgtcaaattttttgttctccccttctgccatcttaaatgtaagctgaaactggtctactgtgtctctagggttaagccaaaagacaaaaaaaattttactacttttgagattgccccaatgtacagaattatataattctaacgcttaaatcatgtgaaagggttgctgctgtcagccttgcccactgtgacttcaaacccaaggaggaactcttgatcaagatgcccaaccctgtgatcagaacctccaaatactgccatgagaaactagagggcaggtcttcataaaagccctttgaacccccttcctgccctgtgttaggagatagggatattggcccctcactgcagctgccagcacttggtcagtcactctcagccatagcactttgttcactgtcctgtgtcagagcactgagctccacccttttctgagagttattacagccagaaagtgtgggctgaagatggttggtttcatgtttttgtattatgtatctttttgtatggtaaagactatattttgtacttaaccagatatatttttaccccagatggggatattctttgtaaaaaatgaaaataaagtttttttaatggaaaaaaaaaaaaaaaaaaaaaaaaaaaaaaa

SEQ ID NO: 270 - DNA, 4028 bp, Homo sapiens
gggggcgggacgcgccgaggagtggggcgcgagccgccggttttgattagtgcgcggagctgcggcggtggagctgctcggccgggagcccggcggcgagacggagaggcggcggaggtgcccgcgcgcagggtctggtgggcggccgcgaggctcgggagaggcgaaccggagcgcgggaccgcggtcgccccgaccagagccgggagaccgcagcacccgcagccgcccgcgagcgcgccgaagacagcgcgcaggcgagagcgcgcgggcgggggcgcgcaggccctgcccgccccttccgtccccacccccctccgccctttcctctccccaccttcctctcgcctcccgcgcccccgcaccgggcgcccaccctgtcctcctcctgcgggagcgttgtccgtgttggcggccgcagcgggccgggccggtccggcgggccgggggatggcgctgctggacctggccttggagggaatggccgtcttcgggttcgtcctcttcttggtgctgtggctgatgcatttcatggctatcatctacacccgattacacctcaacaagaaggcaactgacaaacagccttatagcaagctcccaggtgtctctcttctgaaaccactgaaaggggtagatcctaacttaatcaacaacctggaaacattctttgaattggattatcccaaatatgaagtgctcctttgtgtacaagatcatgatgatccagccattgatgtatgtaagaagcttcttggaaaatatccaaatgttgatgctagattgtttataggtggcaaaaaagttggcattaatcctaaaattaataatttaatgccaggatatgaagttgcaaagtatgatcttatatggatttgtgatagtggaataagagtaattccagatacgcttactgacatggtgaatcaaatgacagaaaaagtaggcttggttcacgggctgccttacgtagcagacagacagggctttgctgccaccttagagcaggtatattttggaacttcacatccaagatactatatctctgccaatgtaactggtttcaaatgtgtgacaggaatgtcttgtttaatgagaaaagatgtgttggatcaagcaggaggacttatagcttttgctcagtacattgccgaagattactttatggccaaagcgatagctgaccgaggttggaggtttgcaatgtccactcaagttgcaatgcaaaactctggctcatattcaatttctcagtttcaatccagaatgatcaggtggaccaaactacgaattaacatgcttcctgctacaataatttgtgagccaatttcagaatgctttgttgccagtttaattattggatgggcagcccaccatgtgttcagatgggatattatggtatttttcatgtgtcattgcctggcatggtttatatttgactacattcaactcaggggtgtccagggtggcacactgtgtttttcaaaacttgattatgcagtcgcctggttcatccgcgaatccatgacaatatacatttttttgtctgcattatgggacccaactataagctggagaactggtcgctacagattacgctgtgggggtacagcagaggaaatcctagatgtataactacagctttgtgactgtatataaaggaaaaaagagaagtattataaattatgtttatataaatgcttttaaaaatctaccttctgtagttttatcacatgtatgttttggtatctgttctttaatttatttttgcatggcacttgcatctgtgaaaaaaaaaaaaaacacatctgtagtcttggccaaatgatacactttattttgtggaagtagagaatcaagagaattggttctaggaacctgggttcgttcatcattgttgtttatttttttaaaataaataaataaatatatatatagatgctctgcaacaaactctgtgacagtatccttcagtagagaaagtttcttacttgtgagtacactcttttagaacatttacgggtggcagcagctttgctttagagtttagaagataatagaaggaatgactattcatgtccaaagtgaatggttttgtgcagtgaacaacacatggcgaggtactaactgagaaactttttcatgctttatgcctacctcttgtagttgttgcagagcaaatataaattgtaataagatagctaggccttgcagaaacaaacagaaaaacttaaaaaaaaatgatataagagctggagtctagtatttatatgaatctgtgagagataatttttttggtctcactgcaatgaaccaaaagcggctgagtttggtttttaattgtagccatgtattgaaggcatctttttgaccaactcttgttggttctgtcttgaaccattgttaatcactgtgctgtaattagtatagctaaatcttttccttccttgctcctcccccagcccaccccgtcttcccttaacattttttcagggggggttgggagtggtttcattttagtgtgagtggatgttttgatagttgtaaggaaaaaatgcatttcagacacatttcacacatgagctattttcttacacagtatgtcttattgttaataagaatgtaatttcatgatacaagtatttaataccttttttaagtcagtaaatattctagccatcaataaattgcagtagagtattaagaggggacaggatgagtttactcttaaaattaatcagtatcaaactaagtctactgtgtgtgttttttttttttgttttttgtttttgtttgtttactattatagtaagtctagtcttatttaaattggatttttgtattcaagtttatatgacaaaatagactagatcagcgctggttgtaaatgcatgctgtacctcactgttttctccccatcatgccgctaaacttgctcgccaggttgtgcttaacttgtggtgaactggacttgattctgttttgttttgtttttttaaaaaaaaaaaacaaaaatgtaagggacagtgcataagccttttctttgttaagtagtggtgttttgctttttcttcaggattggatggcatgttgtccacaggaatgcctactgcagggctaacactggcaatatggcagctttaaattctgagttactacagtctccatgtcaaagcataatgtgtagcatatcagcaataactacatatttatagaaaacactttttcactttactgagccaattcatttaattgtcaaatgtctatatccatggtttaaatggcaacatatctataagtatgtatacacattatatttaagcttttctctgggccaaactgcttcatccttttttctttctttttttttttttttagccttatgatgaatttgtttgaagggcattttctttatgaacaaaggcttggatgcatattcctttctttctgtgaatgggtattattccctgaggaaagttgcacagtgaaaaccagtctggttgtgacccactacatgttttgtttttaatcactattacctgagttgaactttgctcaccatgtttgtacttgttggtctgtttaatgaagtttggttgatgccatcctttgcactgccgaagcgtaatcttgtgtattacttagctctctgctgatctcagtatggacagtgtaacaacaaaaccaaaatggctggacagacttcttgtgttttgtaaatataaactaggacagttctgtaggtttgttcagtgtgctagtggagtatttccttaatgtaaaacttcacttaacagagagattctttgtttagcaagcttggagtgatgataaaatggtaagaaataatataaatgttgaagaaagcatcacaacagaactataggagtctaaatttaataaatctttaaaaaaaaccagtgtctagaatatataccatgttttattatttaaaatcattgtcttaaatttttgttcaaaaaataaaaatttgaatacaatcaaaacgttaaaaaaaaaaaaaaaaa

SEQ ID NO: 271 - DNA, 10396 bp, Homo sapiens
cgggcctgggctgtggctgtgactggcgctgccgtgggcgccgcagccctcgcgggagccggacgcggtaatgccccagcggcgcagcgggcggctgcgtccctgagccgctatataagcgcggcagggaacatccggaggggctgaagatgaaggtgcccgcgcatgggcccccgctgattgccagtccctcccgaccccgcgccccgcgcggagcccgaggccgccgaggacccgccttcgccgcagtagcagctggagcagcgacagaggcggcagctgcggcggcggcggcgcccgcgcccctcgcgccagcgcgtagagcggcggcggcagctcgggggccgccactgccccggctgccatgagttgtgcggaggtgatgtatcacccccagccttatggagcgtcccagtatctgcccaaccccatggcagcgacaacctgccccacagcctactatcagccggcgccccaacctggccagcagaagaagttagcggtattcagcaagatgcaggactctctggaagtcacccttcccagcaaacaagaggaggaggatgaggaggaggaggaggaggagaaagaccagcctgccgagatggagtaccttaactctcgctgtgtccttttcacttatttccagggagacattgggtcagtagtggatgaacacttctcaagagctttgggccaagccatcaccctccatccagaatctgccatttcaaaaagcaagatggggctaacccccctatggcgagacagctcagctctctcaagccagcggaatagtttcccaacttccttttggaccagctcttaccagcccccacctgcaccttgtttggggggagttcatcctgacttccaggtcactggaccccctggcaccttttctgcagctgatcccagtccttggccgggacacaacctgcatcagactggcccagcccctccccctgctgtgtctgagtcctggccttatcctttgacatctcaggtgagcccatcctacagccatatgcatgacgtgtacatgcggcaccaccaccctcatgcccacatgcaccaccgccaccgccaccatcatcaccatcaccaccctcctgctggctctgccctggatccatcctatgggcctctgctgatgccttcagtgcatgcggccaggattcctgctccccagtgtgacatcacaaagacagaaccaactacagtcacctctgctacctcagcatgggctggagcctttcatggaacagtagacatagtgcccagcgtgggattcgatacaggtctacagcatcaagacaagagtaaggaatcaccgtggtactgaaacacacaatcttagtgagttaagttgcagcataaatccaagggcccactgggaaaagatactgtcgggtttttccattcagcaataggacacgaaaggcatagaaggagaagacaaagtgtcacgcagttgactggttttcggcctttcttgagaaagcaaagtgggtcccagacattgaagaaaagcatttttatttgtttatttcctcatctgagcctttgccaactgtgcaactctctccttttgttatcttgcttttatcaatatatagctaagtttttgtttcattttgatttttttttttagccaaccaccttgtcaggaaaggatgaaccacacattaaaatgttcattctttcaggaatacaagtttgtagctctatgtgcatctatttttgtagaaatacaaaaagtttggtttagcattgatgggctatttttgagggatgtattttttttaaaattgtaaaaattgttgagttctgtttaaagaacttgctctcagagaagcactggcaaaaatgtttaaaatgcttatctctaagatgtctattatatgctctgtctgtgctttctaggttacctcaaatgttttgtttttttccttcttacaaaagtagctataccgtagtcaaaccaatgcagtattgtttttacattgaatctcagtaaagatttaattccatgctagctcaattagttttgaattatatgtatagcttgaaaagtttttttttaatgactgtgctaaagaaatgatattttattgctttgatttctcccaaagaataacttggaggttgactaataagaaagttggcataaactttcaatcaaatgaagagtttgcctagaggagactaattctctttctagcccatccaaatttgataaatggaaccagaggttatatacaactacaaggaaaaaaatgcatttaaccatgccacctatgagtgccagtgacttattttacttgtttttaattattcattcatggcaatttaaaaagtcatattttaagtgggatttgtttttcctgaagggcatttgaaggaacaatatctgggaaggtactagagaaattacaaagcccgagctctttcttataatgccacctatccctgtaagctaaacaaacaaacaaacaaacaaacaaacagttctatatataatagtttcaacacagaacttaacaagtctctttttttgtttgtttaaatctggctttacttgatttaattcctttttagaaagaaatttagggcaaaataaagtgtatattaggatttaaatttatgccacaatttaaaaataaaaccagaggttatatacaatttaaattgggctaaaaattaaaaatttgaggatttaacttgatatagctctcaggatctaaataaagtttaaattatcattaagacactgctaggagaagattaagattatgaaagtaacagttattgatactgctggacttcaaaggcaaagttcatttcttccattaactgcttccagagatgtcatgtaaaaaagttagtgtattagagaagttttttagctttataaagaggttttttcaaatttctcccatttttctctccacccacataaaatagtatgttcagtgaaatgccactttctatctttaattgttcgtatcatatatgcgaactttttagacatgaacatgacatgttcagctaggcagagttctcatagataattttcaaatattttccttggctgtaatttatgtattcatttatatcctatccgtcttttgagcttcagatctatatactcttttgtactctcatcactccgcactttgctgtttcttacctagactctcttttacacaatatgcacatttttaccattgtggggtccaaatttaagataccttccactcactaataatatgaacttatatttcctgggagtagccaggttaaattttctatactttggtccataatttgatttgatatgattgtttcatttataatttgcccaaatacatggagcacaaaatttagtgaatttataaatctggatttgccttgtgtccttctgagttttcaaaggcaagtattcaacagtccctgtgtgatgactgacagggttatttgcctcatccacatccaccttcggaatacattaacttcctttgtaatttatttgaaagtagtgttaaactcattcagatcattcagttggattttcccaatgaagaggaaaaggaaagtagttattcctagctccatttcttattttccaccaaatttaattgaagggcattaattagatgtcttcaccctgaatttagactttgctctgtgttctcccggtaactgtcagacaaaaagtttattggctctgaggaactgagaaatgttgggaacctggtttctgctgtacacaggaaagatttgtaagtgagctctctctttgaaaacaggacccaggctgggcacagcagctcatgcctgtaatcctagtattataggaggcagaggctcgggaggattgcttgagcccaggagttcaagatcagcctaggcaacatagggagaccctatccctacaaaaaatttctgaaaaattacctgggcattgtggggcacacctgttgtcccagctactctggaggctgagtccggaggaacgtttgagcctgggagtttgagtttgcagcttgcagtgagctgtgattgcaccactgtactccagcttgggcaacagagcaagatcctgtctcaaaaggaaaaagaaaacaggacctaggtgtttggggtacactgccacccagggagtggatcaaaaatatacatagaaagagaatgagcatgtctctataattgtcttctaggaccatattgctgttagaagtcctaaaagaggatgggttgtaatttagcataatattctgaattcattccaagtttaaaatcctgtcattctctggctcttcttttttcacatcaaaatgatgctgttggacttagaggcttccgaactgttttattgagggctactatctgcctccacaattttattaaaaccactccacctttagacaaaggtgacttttgtctgattttacaaatcagattttattcaagctttctaaatatctgtgaagtagaccctagaaaattgtctcgtttattttaaatagaatctatgcttccaccaataaaccatcgggagctaagaaacaacataatgttgacaaatcaggaacctaacagattattttgtctctcattattaatttgaaagagcctctaaacttttgagaaatcaatgtgtcttcttaagaaagttaagcaccctctcttaactttcccctctatttgctctcctttttctttcttcttaagagtatttatattattttgttaagcaaaaatggctaagattgctctaaaatttgcaaaatgaggagtggattgcaaataattgagggatttatttctttaactttataagactttaaaaaaaaaacccaaattctaagcactgacatgaaagttgcctttgagaagcttgttattcattatacaaaaagtatttgcccattcctattctaagatttgcagaatatgtcaccctatctagcttttgagtttgctatctggtttaatgttgtatttataatttaaagtggaaatcagaaactgtttcaagaacctgtattctattccttactgagtgtcccttctttaaatagtgtttgctgaattaagccgatgggggcagtggcgttaagtggtggaaaaaggaaagtatatatgttagagttttgaatgagggataaatagaaagcagaatgaattaatggaaaagaactcggctgttaggccattctctaaattctagtttagccaaaagtttatgtgtggtttggggcttcatttatttatctcatgagtaaaatggaataatacctaacaggcaggctctggaagttggaaatcacatacacacacacacacacacagacacacacacacacgatcaatcatgtagctcatattagatgttcaataaataacagctactacagatgcctatcagttgagtaagtagttcattaaattgagctcccaaaggtctcttctcttcacatccatatccgtttctgcagcaatcaaatagatacatgattgtttttctgtaagaaattactgcaaagagaatctttttctcctactaactgttccttctacctggtataggagataaatgtacgtttcttaattagctgactttttagtatgtcatttctgaaggaaaaataaattaaccttaaagtggcatgtaggtccaattcagttttcctacatgttccaaaattttatttaaattactgtgtccaaaattatgaggacagtgtcattcattcaccatagtttatatttttagttatatatcaaacttccttggcacctaggataagaacatttcttttgaagttatccaatttttttttatttttacttgacttgaaggaaagttggaaaatatggtggaaaaaatcttccgcattaaaagggggaaaaacacaaccatttacgatctcagtcagcagatttactctactcaaggaaaaaaagaaacaatcttattggaagcagatgttgacactgtgtcagttattgaagacggaaggagttcacttgagccattgcagttacaaaggggtattgatggcagtttggattcctgattgatcacctttgcagccaagggaaagacagcagaaactgtatgggatcagaaatgaaatcagcctgccagtttaatggagaggctcctagaaactcattttttttctttcctgtaagataaaagacatctttcagaataagaaaggcttgtttgagagagaaattacagtttattctctgaaaatatttaaaggccaaagtgccctttaaatctattattaaagcattgaaactgttattaaaatcattatagaaaaattaggtaaaaattttagcctaactttcaacatccattcaaaaacgaatgttgaaaacaaacatataacctataaaaaagtgaatggctctggcaagtgggggcatgggtggagtccataaggaaacctcagtctcaataacttcaaaatgttacttttcatggtaacttggtcatggagattggtcacagcacagacatttagaattttttagcaggttttttttttcttttgaatcttgtagtgctctctgggaattgcaccatgtacacttttacaacctacagaaatcgtcattattgttaaagtatctcaacttttctatttcttttattgtctattgtgcttttttgtttaaaaatacttttatagttttaaagtattggtcaaagtagtattctcttgaagttctagtcaatttaatttgatccaataagtttttctgaatctcctttttaagttccaagaaattctattataaataagtgtacttttaccaattccattgtataagcaaacagacaccttttagaaaaggataagtaatcatcaatttgtttttttaaaaaaaaaaacaatttctagactactaaatttggcataagaataattcttttaaaatgcaacatactttaattagtttttttggtatatgcataagatgtgaactttcctattgatatcactttatattaatagagatgtacatttctttctatgccgtggctagagcaaaagttaataatgattatttacacaattgatttaatttcttaggatatgtataatattggatattatatctgatttaaaaatactattccatacattttttttttcaggagataaaacatagggaaaggttttcatgtgaattctttgtatcactttgaagtacatatatttaaagggaagatggatacaatttgtttttattatataaatctaggtaaggtgaaatgcttttgtcaacaaaaatacagtgtagtgaattttatatttgtcacttgattaggtaaactgaaaactaacaatagaaatattattttactgcattgaaataccatgaactttcagacttgttagttctacaagaagttgtgctaccttaattttgtgtttccagaaataaaaattaaccttagttatgctgtcatttttaactaataaaaaaagtataattcataaaacttttggctttataagataattataaaattatatatttttttctgtttttgtggggttgggaaaacattttcttatttctattcactcttcaaatgcaggtctcataatatgtgtcaatgatataagatgatggaagactttgtaataaaaacatatgtcattatcttcaatttgttcaataaataatttaatgtgaattgaatgtttgtattttaacatagcatttggatttggtctgcatttcttgagaatttaaagctctttttgtttcctccttattcaattaagcatcttataaatattttggaaattacaacatcttaggtgttattaattaagaagttaatttctagggccaagaagtctatatgttacagcaaggaatagattataaaatacatgtttataatggaaaagaaaatgaaatggggtatattaattacataacagcaagagtcttgagaattttataatacaatgcttctaaggatattggttgaccaaggtgtattttattgtttttacatttgttgacagggactctgccataagtagtatgaaaaaacaaacaaaaacttttctacgattcattaacattgaaaagagaattccaagaccttgtattctgaagaaagctagagtttctctaagtgggccttcaattttcttattacacgtatctttaatgtgaaagtactaaagtctgaaaatcagcatttaaataatagactttccagcattacagatgaaataatttggcgcaggctttttaactgtctaccatatttagaatgtggtgtcaaaatgagatttttagaactgctgtaaaatattactacattactacaacgataacggcctaaaacaacacaaatttattatcttacagctctgtcagtcagacattcagcaaagatcttagtcttggtgggctacagaatgtaggaggcatttcctggatgcttccaagagagaatcttgctgttccctgcttctagagtcctttgcttagtttccttccatcttcaaatccagcaacctggtcaagaccttctcacatgacatcactgacttcctcttcttcctctcccttacatatttaaggactcatgtgattacaatagctgcatctgtgtaatccagaataatctcttcatctcaaggtttttgttctgttttgtttttttgttttgttttgttttgttttgttttgatggagtcttgctctgtcgtcaggctggagtgcagtggcgcgatctcggctcactccaacctccacctcccgggttcaaaggattcccctgcctcagcctctcgagtagctgggactacagatgcgtgctaccacacaaggctaatattttgtattttagtagagacgggatttcaccatgttggccaggatggtctccgtctcctgacctcgtgatctgcctgccttggcctcccaaagtgttgggattacaggcataagccattgcgccatgctcaaggttcttaattacatctttaaaggccctttttccatgtacagtaacatattcaatggttctggggattaggacttggagccattattctacctacaacaattagtattggacttccatcattttctatcactcttgtaatcgagaaggactatttcactgggagtagcaagtcataatgtttgcgttggcatttgtgtgggggtttatcttcattcattaaataattgcatgtaaagaaaattcctgtcactatttcaaatgtttcatgtagttattatagtgcttcagaatccaaagggttatgtgttacttatgtaagatgagcagtctagggggtggagaacaggtcatctagtgcagattcttcctagctgaagtgtgttttctctggggacaaccaagtaggatttaattgttttgcttccttttttgggaacttagacccatcttgcgatgtcctaagtctccaagcatcttatttgacctgcttatacacatttgactaaatagctaaatatgaccacattgacgtggtaaagctttaacacttttgtccagattgaatcactccatctgctatcagttaagcagtggaaaactgttatggaaaagcaaacatgttttgatagatttaatgtgtaaagaaggtatccatactctggaatgctgctgatcaataaatgagctgcaagactttgttcgaaacaacactcaagcacaactgttttactttccataccaagtttggctgtgactgaatgaagaacatcagcattgatctttgctttgcacttgtacaagagactatttgcagagagccaaatatagcaacagaggatttaatatcttgccaaaaaatacaaaatctgttcccctttaagcatgacactctatcctttcttgtggatcttgctaaaaggaaaatatagctttaaactcccctattccttctgttgaaagcttaagaatctttttcaaatgagctatgtatggttttgtggtattttatgtttccaaaagaaaatggctacatgaaaaatctgtccagtgttatcatttttcttacaaaaaatacttctagttatggttgtattaattaatttgattgtgataatgattacacaatgtttacctatatcaaatcatcatatcgtataccttaaatatatataacttttatgtgtcaattataactcagtaagtctgggaaaatatcgttaagtcaaagattagagtcaacagaaataaagaaaaatcatactttgataacttcaggactaatcaaggatcaatgggtgacatgatatcatgctatgtgccattttgtgttaaacaaattacaccaacaataaaaaaaattggcttcaa

SEQ ID NO: 272 - DNA, 3223 bp, Homo sapiens
tcaatcccttaattaaatagcttcccctctacaggcttttgaagtggtagcagttcctcctaactcctgccagaaacagctctcctcaacatgagagctgcacccctcctcctggccagggcagcaagccttagccttggcttcttgtttctgctttttttctggctagaccgaagtgtactagccaaggagttgaagtttgtgactttggtgtttcggcatggagaccgaagtcccattgacacctttcccactgaccccataaaggaatcctcatggccacaaggatttggccaactcacccagctgggcatggagcagcattatgaacttggagagtatataagaaagagatatagaaaattcttgaatgagtcctataaacatgaacaggtttatattcgaagcacagacgttgaccggactttgatgagtgctatgacaaacctggcagccctgtttcccccagaaggtgtcagcatctggaatcctatcctactctggcagcccatcccggtgcacacagttcctctttctgaagatcagttgctatacctgcctttcaggaactgccctcgttttcaagaacttgagagtgagactttgaaatcagaggaattccagaagaggctgcacccttataaggattttatagctaccttgggaaaactttcaggattacatggccaggacctttttggaatttggagtaaagtctacgaccctttatattgtgagagtgttcacaatttcactttaccctcctgggccactgaggacaccatgactaagttgagagaattgtcagaattgtccctcctgtccctctatggaattcacaagcagaaagagaaatctaggctccaagggggtgtcctggtcaatgaaatcctcaatcacatgaagagagcaactcagataccaagctacaaaaaactcatcatgtattctgcgcatgacactactgtgagtggcctacagatggcgctagatgtttacaacggactccttcctccctatgcttcttgccacttgacggaattgtactttgagaagggggagtactttgtggagatgtactatcggaatgagacgcagcacgagccgtatcccctcatgctacctggctgcagccccagctgtcctctggagaggtttgctgagctggttggccctgtgatccctcaagactggtccacggagtgtatgaccacaaacagccatcaaggtactgaagacagtacagattagtgtgcacagagatctctgtagaaggagtagctgccctttctcagggcagatgatgctttgagaacatactttggccattacccccagctttgaggaaaatgggctttggatgattattttatgttttagggacccccaacctcaggcaattcctacctcttcacctgaccctgcccccacttgccataaaacttagctaagttttgttttgtttttcagcgttaatgtaaaggggcagcagtgccaaaatataatcagagataaagcttaggtcaaagttcatagagttcccatgaactatatgactggccacacaggatcttttgtatttaaggattctgagattttgcttgagcaggattagataaggctgttctttaaatgtctgaaatggaacagatttcaaaaaaaaaccccacaatctaggatgggaacaaggaaggaaagatgtgaataggctgatgggcaaaaaaccaatttacccatcagttccagccttctctcaaggagaggcaaagaaaggagatacagtggagacatctggaaagttttctccactggaaaactgctactatctgtttttatatttctgttaaaatatatgaggctacagaactaaaaattaaaacctctttgtgtcccttggtcctggaacatttatgttccttttaaagaaacaaaaatcaaactttacagaaagatttgatgtatgtaatacatatagcagctcttgaagtatatatatcatagcaaataagtcatctgatgagaacaagctatttgggcacaacacatcaggaaagagagcaccacgtgatggagtttctctagaagctccagtgataagagatgttgactctaaagttgatttaaggccaggcatggtggtttacgcctataatcccagcattttgggagtccgaggtgggcagatcacttgagctcaggaggtcaagatcagcctgggcaacatggtgaaacctggtctctacataaaatacaaaaacttagatgggcatggtggtgtgtgcctatagtcccactacttgtggggctaaggcaggaggatcacttgagccccggaggtcgaggctacagtgagccaagagtgcactactgtactccagccagggcaagagagcgagaccctgtctcaataaataaataaataaataaataaataaataaataaataaataaaaacaaagttgattaagaaaggaagtataggccaggcacagtggctcacacctgtaatccttgcattttggaaggctgaggcaggaggatcactttaggcctggtgtgttcaagaccagcctggtcaacatagtgagacactgtctctaccaaaaaaaggaaggaagggacacatatcaaactgaaacaaaattagaaatgtaattatgttctaagtgcctccaagttcaaaacttattggaatgttgagagtgtggttacgaaatacgttaggaggacaaaaggaatgtgtaagtctttaatgccgatatcttcagaaaacctaagcaaacttacaggtcctgctgaaactgcccactctgcaagaagaaatcatgatatagctttgccatgtggcagatctacatgtctagagaacactgtgctctattaccattatggataaagatgagatggtttctagagatggtttctactggctgccagaatctagagcaaagccatccccgctcctggttggtcacagaatgactgacaaagacatcgattgatatgcttctttgtgttatttccctcccaagtaaatgtttgtccttgggtccattttctatgcttgtaactgtcttctagcagtgagccaaatgtaaaatagtgaataaagtcattattaggaagttcaaaagcattgcttttataatgaacttagaaaaacgtatgtgtgtgtgtttaattagaataaaattcctctaggcagatttcaggagctccaaaa

SEQ ID NO: 273 - DNA, 4670 bp, Homo sapiens
gcactcgctggaaagcggctccgagccaggggctattgcaaagccagggtgcgctaccggacggagaggggagagccctgagcagagtgagcaacatcgcagccaaggcggaggccgaagaggggcgccaggcaccaatctccgcgttgcctcagccccggaggcgccccagagcgcttcttgtcccagcagagccactctgcctgcgcctgcctctcagtgtctccaactttgcgctggaagaaaaacttcccgcgcgccggcagaactgcagcgcctccttttagtgactccgggagcttcggctgtagccggctctgcgcgcccttccaacgaataatagaaattgttaattttaacaatccagagcaggccaacgaggctttgctctcccgacccgaactaaaggtccctcgctccgtgcgctgctacgagcggtgtctcctggggctccaatgcagcgagctgtgcccgaggggttcggaaggcgcaagctgggcagcgacatggggaacgcggagcgggctccggggtctcggagctttgggccagtacccacgctgctgctgctcgccgcggcgctactggccgtgtcggacgcactcgggcgcccctccgaggaggacgaggagctagtggtgccggagctggagcgcgccccgggacacgggaccacgcgcctccgcctgcacgcctttgaccagcagctggatctggagctgcggcccgacagcagctttttggcgcccggcttcacgctccagaacgtggggcgcaaatccgggtccgagacgccgcttccggaaaccgacctggcgcactgcttctactccggcaccgtgaatggcgatcccagctcggctgccgccctcagcctctgcgagggcgtgcgcggcgccttctacctgctgggggaggcgtatttcatccagccgctgcccgccgccagcgagcgcctcgccaccgccgccccaggggagaagccgccggcaccactacagttccacctcctgcggcggaatcggcagggcgacgtcggcggcacgtgcggggtcgtggacgacgagccccggccgactgggaaagcggagaccgaagacgaggacgaagggactgagggcgaggacgaaggggctcagtggtcgccgcaggacccggcactgcaaggcgtaggacagcccacaggaactggaagcataagaaagaagcgatttgtgtccagtcaccgctatgtggaaaccatgcttgtggcagaccagtcgatggcagaattccacggcagtggtctaaagcattaccttctcacgttgttttcggtggcagccagattgtacaaacaccccagcattcgtaattcagttagcctggtggtggtgaagatcttggtcatccacgatgaacagaaggggccggaagtgacctccaatgctgccctcactctgcggaacttttgcaactggcagaagcagcacaacccacccagtgaccgggatgcagagcactatgacacagcaattcttttcaccagacaggacttgtgtgggtcccagacatgtgatactcttgggatggctgatgttggaactgtgtgtgatccgagcagaagctgctccgtcatagaagatgatggtttacaagctgccttcaccacagcccatgaattaggccacgtgtttaacatgccacatgatgatgcaaagcagtgtgccagccttaatggtgtgaaccaggattcccacatgatggcgtcaatgctttccaacctggaccacagccagccttggtctccttgcagtgcctacatgattacatcatttctggataatggtcatggggaatgtttgatggacaagcctcagaatcccatacagctcccaggcgatctccctggcacctcgtacgatgccaaccggcagtgccagtttacatttggggaggactccaaacactgccccgatgcagccagcacatgtagcaccttgtggtgtaccggcacctctggtggggtgctggtgtgtcaaaccaaacacttcccgtgggcggatggcaccagctgtggagaagggaaatggtgtatcaacggcaagtgtgtgaacaaaaccgacagaaagcattttgatacgccttttcatggaagctggggaatgtgggggccttggggagactgttcgagaacgtgcggtggaggagtccagtacacgatgagggaatgtgacaacccagtcccaaagaatggagggaagtactgtgaaggcaaacgagtgcgctacagatcctgtaaccttgaggactgtccagacaataatggaaaaacctttagagaggaacaatgtgaagcacacaacgagttttcaaaagcttcctttgggagtgggcctgcggtggaatggattcccaagtacgctggcgtctcaccaaaggacaggtgcaagctcatctgccaagccaaaggcattggctacttcttcgttttgcagcccaaggttgtagatggtactccatgtagcccagattccacctctgtctgtgtgcaaggacagtgtgtaaaagctggttgtgatcgcatcatagactccaaaaagaagtttgataaatgtggtgtttgcgggggaaatggatctacttgtaaaaaaatatcaggatcagttactagtgcaaaacctggatatcatgatatcatcacaattccaactggagccaccaacatcgaagtgaaacagcggaaccagaggggatccaggaacaatggcagctttcttgccatcaaagctgctgatggcacatatattcttaatggtgactacactttgtccaccttagagcaagacattatgtacaaaggtgttgtcttgaggtacagcggctcctctgcggcattggaaagaattcgcagctttagccctctcaaagagcccttgaccatccaggttcttactgtgggcaatgcccttcgacctaaaattaaatacacctacttcgtaaagaagaagaaggaatctttcaatgctatccccactttttcagcatgggtcattgaagagtggggcgaatgttctaagtcatgtgaattgggttggcagagaagactggtagaatgccgagacattaatggacagcctgcttccgagtgtgcaaaggaagtgaagccagccagcaccagaccttgtgcagaccatccctgcccccagtggcagctgggggagtggtcatcatgttctaagacctgtgggaagggttacaaaaaaagaagcttgaagtgtctgtcccatgatggaggggtgttatctcatgagagctgtgatcctttaaagaaacctaaacatttcatagacttttgcacaatggcagaatgcagttaagtggtttaagtggtgttagctttgagggcaaggcaaagtgaggaagggctggtgcagggaaagcaagaaggctggagggatccagcgtatcttgccagtaaccagtgaggtgtatcagtaaggtgggattatgggggtagatagaaaaggagttgaatcatcagagtaaactgccagttgcaaatttgataggatagttagtgaggattattaacctctgagcagtgatatagcataataaagccccgggcattattattattatttcttttgttacatctattacaagtttagaaaaaacaaagcaattgtcaaaaaaagttagaactattacaacccctgtttcctggtacttatcaaatacttagtatcatgggggttgggaaatgaaaagtaggagaaaagtgagattttactaagacctgttttactttacctcactaacaatggggggagaaaggagtacaaataggatctttgaccagcactgtttatggctgctatggtttcagagaatgtttatacattatttctaccgagaattaaaacttcagattgttcaacatgagagaaaggctcagcaacgtgaaataacgcaaatggcttcctctttccttttttggaccatctcagtctttatttgtgtaattcattttgaggaaaaaacaactccatgtatttattcaagtgcattaaagtctacaatggaaaaaaagcagtgaagcattagatgctggtaaaagctagaggagacacaatgagcttagtacctccaacttcctttctttcctaccatgtaaccctgctttgggaatatggatgtaaagaagtaacttgtgtctcatgaaaatcagtacaatcacacaaggaggatgaaacgccggaacaaaaatgaggtgtgtagaacagggtcccacaggtttggggacattgagatcacttgtcttgtggtggggaggctgctgaggggtagcaggtccatctccagcagctggtccaacagtcgtatcctggtgaatgtctgttcagctcttctgtgagaatatgattttttccatatgtatatagtaaaatatgttactataaattacatgtactttataagtattggtttgggtgttccttccaagaaggactatagttagtaataaatgcctataataacatatttatttttatacatttatttctaatgaaaaaaacttttaaattatatcgcttttgtggaagtgcatataaaatagagtatttatacaatatatgttactagaaataaaagaacacttttggaaaaaaaaaaaaaaaaaaaaa

SEQ ID NO: 274 - DNA, 7289 bp, Homo sapiens
gctgcaattcaagttggctgggggccggtagtgagatctagggctacttcaacaaaactttgctgcccttcctgctcctcttgtcttcttttctcctgataccttttgatgctctgcacatgttatttgcatagcaaaggcactaagctttccaggaagagagggcaccacttccacccccaataagtcttttttcccgtcttttctttcttttcctttccttttttggggggtggggagggagagaaagggggtttgcaaaggcagcatctcagagtgatagcctagatgtattgaaggcatctcttattctgccaaatcggaaagtcagttctctaaagcccgggttagccagaccatagggttttattctggctgcagaataactggctggtgtggctttgcaaaggggggcaaaaaataaaaaaataaaaaaaattaaaaaaagttagagaggagagggagtacgtgagtcgtccagtgcaatctctattgtctgaaacttactttttatcagaatttgaagatgaaaacggttaaaaaatggccatactttagtaactaatcagcctaatgctttgcttatgaaaacttttaccatcattatttttttcattttggattgagaaaatgaatccagatatagaagaaagtgcaggatgttggataaaagtggctcttaaacagtggaacatccaataactaatttgcaagaagttttaaagaaataaaattgttatgcttcgattttggtatggtattgactctttagcacataggtagccctcaaaaaaatcatccagttttctaaattatggaaattttgtggaagacgttgacctggattttgagcctcatcatggcttcatcggaatttcatagtgaccacaggctttcatacagttctcaagaggaattcctgacttatcttgaacactaccagctaactattccaataagggttgatcaaaatggagcatttctcagctttactgtgaaaaatgataaacactcaaggagaagacggagtatggaccctattgatccacagcaggcagtatctaagttattttttaaactttcagcctatggcaagcactttcatctaaacttgactctcaacacagattttgtgtccaaacattttacagtagaatattgggggaaagatggaccccagtggaaacatgattttttagacaactgtcattacacaggatatttgcaagatcaacgtagtacaactaaagtggctttaagcaactgtgttgggttgcatggtgttattgctacagaagatgaagagtattttatcgaacctttaaagaataccacagaggattccaagcattttagttatgaaaatggccaccctcatgttatttacaaaaagtctgcccttcaacaacgacatctgtatgatcactctcattgtggggtttcggatttcacaagaagtggcaaaccttggtggctgaatgacacatccactgtttcttattcactaccaattaacaacacacatatccaccacagacagaagagatcagtgagcattgaacggtttgtggagacattggtagtggcagacaaaatgatggtgggctaccatggccgcaaagacattgaacattacattttgagtgtgatgaatattgttgccaaactttaccgtgattccagcctaggaaacgttgtgaatattatagtggcccgcttaattgttctcacagaagatcagccaaacttggagataaaccaccatgcagacaagtccctcgatagcttctgtaaatggcagaaatccattctctcccaccaaagtgatggaaacaccattccagaaaatgggattgcccaccacgataatgcagttcttattactagatatgatatctgcacttataaaaataagccctgtggaacactgggcttggcctctgtggctggaatgtgtgagcctgaaaggagctgcagcattaatgaagacattggcctgggttcagcttttaccattgcacatgagattggtcacaattttggtatgaaccatgatggaattggaaattcttgtgggacgaaaggtcatgaagcagcaaaacttatggcagctcacattactgcgaataccaatcctttttcctggtctgcttgcagtcgagactacatcaccagctttctagattcaggccgtggtacttgccttgataatgagcctcccaagcgtgactttctttatccagctgtggccccaggtcaggtgtatgatgctgatgagcaatgtcgtttccagtatggagcaacctcccgccaatgtaaatatggggaagtgtgtagagagctctggtgtctcagcaaaagcaaccgctgtgtcaccaacagtattccagcagctgaggggacactgtgtcaaactgggaatattgaaaaagggtggtgttatcagggagattgtgttccttttggcacttggccccagagcatagatgggggctggggtccctggtcactatggggagagtgcagcaggacctgcgggggaggcgtctcctcatccctaagacactgtgacagtccagcaccttcaggaggtggaaaatattgccttggggaaaggaaacggtatcgctcctgtaacacagatccatgccctttgggttcccgagattttcgagagaaacagtgtgcagactttgacaatatgcctttccgaggaaagtattataactggaaaccctatactggaggtggggtaaaaccttgtgcattaaactgcttggctgaaggttataatttctacactgaacgtgctcctgcggtgatcgatgggacccagtgcaatgcggattcactggatatctgcatcaatggagaatgcaagcacgtaggctgtgataatattttgggatctgatgctagggaagatagatgtcgagtctgtggaggggacggaagcacatgtgatgccattgaagggttcttcaatgattcactgcccaggggaggctacatggaagtggtgcagataccaagaggctctgttcacattgaagttagagaagttgccatgtcaaagaactatattgctttaaaatctgaaggagatgattactatattaatggtgcctggactattgactggcctaggaaatttgatgttgctgggacagcttttcattacaagagaccaactgatgaaccagaatccttggaagctctaggtcctacctcagaaaatctcatcgtcatggttctgcttcaagaacagaatttgggaattaggtataagttcaatgttcccatcactcgaactggcagtggagataatgaagttggctttacatggaatcatcagccttggtcagaatgctcagctacttgtgctggaggtgtccaaagacaggaggtggtctgtaaaaggttggatgacaactccattgtccagaacaattactgtgatcctgacagtaagccacctgaaaatcaaagagcctgcaacactgagccctgcccacctgagtggttcattggggattggttggaatgcagcaagacttgtgatggtgggatgcgcacaagggcagtgctctgcatcaggaagatcggaccttctgaggaggagacgctggactacagtggttgtttaacacaccggcctgtcgaaaaagagccctgcaacaaccagtcatgtccaccacagtgggtggctttggactggtctgagtgtactccaaaatgtggtccaggattcaagcatcggattgttctgtgcaagagcagtgacctttctaagacattcccagctgcacaatgtccagaggaaagcaaacctcctgtccgcatccgctgcagtttgggccgctgccctcctcctcgctgggtcacaggagactggggccagtgttctgctcagtgtggccttggacagcagatgagaactgtgcagtgtctctcctacaccggacaggcatctagtgactgtctagaaactgttcggcctccatcaatgcagcagtgtgaaagcaaatgtgacagtacccccatttctaatactgaagagtgcaaagatgtgaataaagtggcttattgcccactggtgctgaagttcaagttctgcagtcgagcatacttcagacagatgtgttgtaagacctgccaaggacactgacccacagaaagccagagagagtgccttgtcatttcatcatggaaatgcatccatcaaagagagccacccagaggaagaggattgatgtccttgcaaatgcattaccctgtggaaaacgtaaccactggtcagccctagctgacaaaatttcaatattattttagcttctgtgaagtgggatttattgatccaaagtgctggacacggtattaggagggaatgccagattggagagatccaaacaacacagggagacttgcttactgtggagcgtttgtgttctttcgagtaaatccaatagcctgtttacctccttggaccattaagataatttttattatggacttagcaatgacactgaatccatttgtatttaaaactgtttaaaatgtagctgttatgacttggtcaactatggaagtgaagaaggttcagaattcttaagtcatagcttaaaaatatttactgtactttatctcactacaacagcaccacaatttaaattataaaacgggctttgaactataatttaaggagcaattataaatcaaaagtaatgaaagtttgtattatttttcttcattccacttaatttccttaggaataatcccctggttctgaacactgctgtgagccatatataaaactatattaaactgaacaataatgaggggcatagtttaaagcagtgcatcagttactgcagctgtgcaagtctataaactcagtgctgaaagactgtggccaacttgccattgtgcaagtaaagctgagatttccattaaaactttaagagaaaaacatttcaatttcatgcagaaaccagacctggggtatggtacagaccaaaggaccaggccctttgctgccaccacacaggatgccttagttcttatttgagtccctccaactcacttgtgtttacatcctccccagccacagcacggcttctgccctttggattgctgcacgtgtgttgagcttactgagatgataccatgcaaaagatagactggctcggtaaccaggcagacccttttgcagtttgttgacaattacgatgagttccagatgtcccttctttgatatggtagaagggcatttatttatatgagagcaaatgtgtgtgtgtgtttgcgggcgcttttaagtgtgtggatagatgagtgtgcttgcacataatgtgctatttctgtgagttttaaagtaggcaagggataataaccaaagaagaaaatttcatgaagactagacatcataaagcataattttaatagtcactcaaccaagtattttttattttttatggatactctgaatggcaattaaatgtgaaacccagtttcttgggcaagtcaaattctggaatcacatccacctaaattaaaatgactagctcgtattttccccatcttcaagtttcacatcctggtcatcaaaagactcgacagcaagacttagaatgaaaaagggtacttgtttatattaatattttttacttgaacacgtgtagcttgcagcaggttcttgatgaatgtgctttgtgtccaaaatgcctccccattgtacacaggtgtacaccatgcatgcaccaacacctaaaactcaaaactaaatggctattttgtaaggttaatactttcagttaaacagcatgtttgacttgattccatcatggtgctcttaaattacatgtcagtgcatcacatatatcatgatctaatgcagatgactaggctttttccaaaaggaagacagaccctcagacaccaaaagccaatctaaacaactcccaggtttgctgtggacaatcagcatggaatgttttctgcactctcagtcatgaccatctgtatcttgttacctgctttctctctcaacaccacagttctcaaccctgagccttccagagagagctattgatgatacaagaggaatcaccagggcccggatctaagatgcccttagaagaccagcccaagtgccgtcttagccattcagtgaagggcaaacagcccatgggtagtatggcccgagcactgaattcccttgcgccttttcaaagaacagttaacttggtgctaatgtgccctggtgaaataaataaaagatgggcagtttctgtggcattttaggcataggtttgcaatccagatctgattttctccaacataaatatcagctcatgttcttatttcaaaaagatttcttattaccgactaaaagctattttttacctcacctggaaactaccattgtgagggccatcccccaggcactgcacagcaccttggctgatgctggaagaggagggcagtcagtgtcacttctgggatgtgccccagcactgagaacaaaatgcaggcatcccccggggcagcatcagagtgcctttctagagggagccacgcacagaatgtaacaggatgaaacagtttcaagtaagccttgaattgaaacctgagtaggttaaaacaattctatttcatagcacatcacaatactgctgctactctgtagccacccccatggctacatgatgccctattcctaaataataacaatagcattgtcagtggaggctgggccaccatggcagaccttccaaaagtagtgagctacatagactacttagggaaccccagggaaactggtaccctacacctgggagcagtatctgccactgggataaagtcctactaaaaaaggaacggtaaatgtaccctaatgattaaaccccgtgagatacatatgatttccaaatagtccatttcattaggaacttttttgtttgaatgaatgtcacataggtatcctcagtaacacagaacgaaattacctttgtattattgtgattagttgttgcttattattttatactcagtaataatgtggtacactgttaatttttttgcttttgtaaattatattctaatttattgccatgtttcctaacacttgtcctacattcattctcctgcttgtaatgaaaatgaaaaaatcattgtaacacttgatggagtgaaattccacgccaggcacagaatttttttgacatagataatttagtaaaataaaaattcagcttataataatgataaaaaaaaaaaaaaaaaaaaaa

SEQ ID NO: 275 - DNA, 8643 bp, Homo sapiens
tggggctcgagggggcgagcggtggcggtggcgggtacggcaggctcgcgggcgccgggcttcgttacataatctcggaccggaggagcggcggcacatggcggcggagcggcgctgtggaagtatgcgagacttaagagctcaagtgactagtggtctcctgccatttccagaagtgactcttcaagcccttggagaagacgaaataacattagaatctgtgcttcgtggaaagtttgctgcagggaaaaatggacttgcttgcttggcttgtggtccacaacttgaggtagtaaactctataacaggagagcgattgtctgcttacagattcagtggagtcaatgaacagcctcctgtagttttagctgtgaaagaattctcttggcagaagagaactggattattaataggattggaagaaacagaagggagtgttctctgtctttatgaccttggaatatcaaaagtagttaaagcagttgttcttcctggaagggtaacagctattgaacctataattaatcatggaggagccagtgcaagcactcagcatttacatccaagtctgcgatggctttttggagtggcagctgtggtcactgatgttggacagatccttcttgttgacctatgtttggatgacttgtcatgcaatcaaaatgaagttgaagcatcagatcttgaagttctaactggtatcccagctgaagtaccacacattagagaaagtgtaatgagacaagggcgccatctgtgtttccagttagtaagtccaacaggaacagctgtttcaactcttagttacataagcaggacaaatcagcttgctgtaggtttttctgatggctatctagcactttggaacatgaaaagcatgaaaagagaatattacatacaattggaaagtggacaagttcctgtatatgctgtcacttttcaagaacctgagaatgatcctcggaattgctgttacttgtgggctgttcagtctacacaagatagtgaaggggatgttttgagtttgcatctgctgcagctggcctttggtaatagaaagtgtttggcatcaggacaaatcttatatgaggggttagaatactgtgaagaaagatacaccctggacctgacaggtggcatgttccctttgaggggacagacgagtaataccaaattgttgggatgccagagtatagagaaatttcgatctcatggtgacagggaggaaggcgtgaatgaagctctatcgcctgacactagtgtttcagtctttacctggcaggtgaatatatatggacagggaaagccttctgtatatttggggctttttgatataaatcgttggtatcatgcacaaatgccagattcgttaaggtcaggagaatatctacataattgctcttattttgcactgtggtcattggagtctgttgtaagtaggacttctccacatggcatcttggatatattagtacatgagagaagtttaaatagaggagtccctccttcatatccacctcccgagcagttttttaatccaagcacttataattttgatgccacttgtttgttaaactcgggagttgttcatttaacttgtactggctttcagaaggagactttgacttttttaaagaaatcaggtccatcactcaatgaactcattcctgatggttataatcgatgtcttgtagctggccttctttccccaagatttgttgatgttcagccttccagtttaagccaagaagaacagttagaagctatattgtcagcagcaattcagactagttccctgggacttttgactggttatatccgaagatggataacagaagaacaaccaaattctgccactaatttgcgctttgttcttgaatggacgtggaataaagtggttctcacaaaagaggaatttgacagactatgtgtgccattatttgatggttcgtgtcatttcatggatccacaaactatacagtctatccagcaatgctatttgcttcttagcaatcttaatatagtcttgagctgttttgcatcagaagcccgagagatcactgagagaggactgatagacttaagcaataagtttgtggtttcccacctcatctgtcagtatgcacaagtggttctttggttctctcattctgggcttttaccagaaggcatagatgattctgtgcagttgtcaaggttatgctacaactaccctgtaattcagaactactacaccagtcgtcgacagaagtttgagcgtttatcaagagggaagtggaatcccgattgcttgatgattgatggactggtttctcagttaggagagcgaattgagaagttgtggaaacgagatgaaggaggcacaggaaaatatcctcctgctagtctgcatgcagtacttgatatgtacctattagacggcgttactgaagcagccaaacactctattaccatttatttgctacttgatattatgtattcctttcccaacaaaacagacactcccattgaatctttcccaactgtatttgccatttcttggggccaagttaaacttattcaggggttttggttgatagatcataatgactatgagagtggtttggatcttttgtttcatccagctactgcaaaacctttgtcatggcaacattcaaagattattcaggcattcatgagtcagggcgagcacagacaagccctcagatatattcagacaatgaagccaacagtgtccagtggtaacgatgttatccttcacctcactgttttgctttttaataggtgtatggttgaagcctggaattttttgcggcaacattgcaataggttgaatatagaggagttactgaagcacatgtatgaagtctgtcaggaaatgggcttgatggaagatttactgaagttaccatttacagacactgagcaggaatgtttagtgaaatttttgcagtccagtgccagcgttcagaatcatgaattccttttagtgcaccatttgcagcgtgccaattatgtgcctgccttgaagctgaaccaaactctgaagattaatgttatgaatgatcgtgatcctcgtttgcgggagagatcactggctcgaaattctatattagaccagtatggaaaaatccttcctagagtccatcgaaaattagccattgaacgagctaagccttatcatctgtcaacatcatcagtttttcgattagtttctagacccaaaccattatcagcagttccaaagcaagttgtaacaggaactgtgttgacaagatctgttttcatcaacaatgtgttatctaaaattggagaagtttgggcaagcaaagaacctataaatagcaccacacctttcaatagttctaaaatagaagaaccatctcctatagtgtattcgctcccagctccagagctgcctgaggcattttttggaacaccaatttcaaaagcatcacaaaaaatttctagactgctagatttggttgttcagcctgtcccccggccttctcagtgttcggagtttattcagcaaagctccatgaaatctcctttgtacctagtatcccgttcactgccctcaagttcgcaattaaaaggatcgcctcaggccatctccagggcttcagaattacatttgcttgaaactcctcttgtagttaagaaagctaaaagtttggccatgtcagttactacttctggattttctgagttcactcctcagtccatcctgaggtctactcttcgatcaacacctttagcatctccctctccatcacctggaaggtctcctcaacgacttaaagaaactagaatttcatttgtggaagaagatgtccacccaaaatggattcctggggctgcagatgatagcaaattagaagtatttactacacctaaaaaatgtgcagttccagtggaaactgaatggctgaagagcaaagataggaccacatcttttttcctgaacagccctgaaaaggagcatcaagaaatggatgaggggtcacaaagtttagagaaactggatgtgagcaaaggaaacagcagtgtttcaatcacatccgatgagactaccttagagtatcaggatgcaccgtcaccggaagaccttgaagagactgttttcacggcctctaagcccaaaagctcttccactgcactaactactaatgtaactgaacaaactgaaaaggatggagataaagatgtatttgcatcagaagtaactccttcagacctacagaaacaaatgggcaatttagaagatgcagaaacaaaggatctcttagttgcagcagaggcattttcagaattgaatcacttaagcccggttcaaggaactgaagcttctctttgtgcaccatcagtctatgaagggaaaatcttcacccagaagtccaaggtaccagtgttggacgaaggattaacatctgttgaaacctacacccctgcaattagagcaaatgacaataaatctatggctgatgtccttggtgatggtggaaactcctcgctcactatctctgaaggtcctattgtctctgagcgcaggcttaaccaggaagtagcgctgaacttaaaagaagatcatgaagtagaagttggtgtactaaaagaaagtgttgacttaccagaagaaaagcttccaatttctgacagccctcctgatactcaagaaattcatgtgattgaacaagaaaagcttgaagctcaagattcaggagaagaggctaggaatctttcatttaatgagttatatccctctggaacacttaagcttcagtacaattttgatactattgaccaacagttttgtgacttagctgataacaaagacactgctgaatgtgacattgctgaagtagatggggaactttttgtggctcaaagcaactttaccttgatattggaaggtgaagaaggagaagttgagccaggtgattttgcatcatctgatgtgttacctaaagcagctaacacagcaactgaagaaaaacttgtatgcagtggggaaaatgataatcatggacaaattgcaaatttgccatctgccgtaactagtgaccaaaagtcccaaaaagtagacactttaccatatgtgcctgaacctattaaagtagcaattgcagaaaatttactagatgtaattaaagacacaagaagtaaagaaattacttcagatacaatggaacagtccattcatgaaacaatacctttagtgagccaaaacataatgtgtcccactaaattggtcaaatctgcatttaagactgctcaggaaacaagcacaatgactatgaatgtcagccaggttgatgacgtggtttcctccaaaactcgtacgagaggtcaacgtatccaaaacgtgaatgtcaaatcagcacaacaggaagcatcagcagatgttgctactcctaagatgccagggcagtcagtcaggaagaaaactaggaaggcaaaagaaatttctgaagcttctgaaaacatctattctgatgtcagaggactatctcagaaccagcaaatacctcaaaattctgttacgcctaggagaggaaggagaaagaaagaagttaatcaggacatactagaaaacaccagttctgtggaacaagaattacagatcactacaggtagggaatcaaaaagattaaaatcatctcagctgttggaaccagcagttgaagaaactactaaaaaagaagttaaggtttcatctgttacaaaaaggactcctagaagaattaaaagatctgtagaaaatcaggaaagtgttgaaattataaatgatctaaaagttagtacggtaacaagtcctagcagaatgatcagaaaattgagaagtactaatttagatgcttctgaaaatacaggaaataagcaagatgataaatccagtgacaagcagctgcgtattaaacatgttagaagggtcagagggagagaagttagtccatcagatgtgagagaagactccaaccttgagtcatctcagttgactgttcaagcagaatttgatatgtctgccatacctagaaaacgtggtagaccaagaaaaatcaatccatctgaagatgtaggatctaaggctgttaaggaagagagaagccccaagaagaaagaagctcccagcattagaaggagatctacaagaaataccccagctaaaagtgaaaatgttgatgttggaaaaccagctttaggaaaatccattttagtgccaaacgaggaactttcgatggtgatgagctctaagaaaaaacttacaaaaaagactgaaagtcaaagccaaaaacgttcattgcactcagtatcagaagaacgcacagatgaaatgacacataaagaaacaaatgagcaggaagaaagattgctcgccacagcttccttcactaaatcatcccgcagcagcaggactcggtctagcaaggccatcttgttgccggacctttctgaaccaaacaatgagcctttattttctccagcgtcagaagttccaaggaaagcaaaagctaaaaaaatagaggttcctgcacagctgaaagaattagtttcggatttatcttctcagtttgtcatctcacctcctgctttaaggagcagacaaaaaaacacatccaataagaacaagcttgaagatgaactgaaagatgatgcacaatcagtagaaactctgggaaagccaaaagcgaaacgaatcaggacgtcaaaaacaaaacaagcaagcaaaaacacagaaaaagaaagtgcttggtcacctcctcccatagaaattcggctgatttcccccttggctagcccagctgacggagtcaagagcaaaccaagaaaaactacagaagtgacaggaacaggtcttggaaggaacagaaagaaactgtcttcctatccaaagcaaattttacgcagaaaaatgctgtaatttcttgggaagattttaatgtacacctatttgtaaagtcatcagaatagtgtggattattaaatatctagtttggaagaaaataatttatataaattattgtaaatttttatgtaaacagaaggtcttcaataagtaaagtaactccatatggagtgattgtttcagtccaggcaatttttctattttatattaagacttcatacatttatatatgtaaatatggcttattaatggaatgttaaataaaatgtatacttcacagtcgtttgtgtcttggatttttgaaagggaggggatatctgtttaaatagttttatatgctcattggtctcattttctctataattaaaatactagaccagtcttaaaatggggatgattgaagtattgatatttctttttacagttactattttataatttatgcactttgattctgtgattcagatttctaatcagaaaatgtatttttttgtttttggctgttactatgttaaaattgaattatgggcatgtcattttgccatctttgtagtttcacaaattttgtgtaatctacctcaaatgaataatccaagtattggttaactataatgttggcatctcttattcggcaagcttaaaggctctttaaagtcttaattagtcaaagactaatccaggttagattgaccggttcactgctcacttgcaaccttatcaaagggtttgacaaagggaaatgtaaaataaatctgtttatggatattgagtgcatcttgtatgtgcctaatattgataggatgagatgtctgaacaaatttttataatattgctgtgaaggagcttgctattgaaccacagaaatcccttaatattcaggttttaaaactggcaaattctcacaggacctcaggcacagattattgaggttgggagagagtgagtagatgtagaaaaggagaaaaacaacacacgccctgttctctacagtacaactgtgtgcaattaagcaatggtacttgatgtaggctctaacactcatcaataaataagtgttgtaaaataatttataacaggtaatcgatagtgtgtaatgaatggactattaataattgattatctagaaacgaactgctttcgtgggcttttaatattttaatgtgaagcatatgcagtgtgctttctgcatttatttttctaccaaataatacagataatgagaaattggtgaaaatgcctacgcaaagtgttgacagtgtgaaagcagtgcgagtgcggccttttagtcaggttagtgatggatgttacgctgccttgttgaaaatttcactgactttgattttattacttttttaatgatagttatcaaacttgtatttaagctgcttgtcatttatggaatattgaacttatttaaatgaacttgttaaatgaataaagagctaaacataattcagtaaacaattcctttgcgcaagtagcacaataaacatggatgcaacgtatgtcaagttaatacttttttaaaccaacgcaatttggtgaatatagatgtgtggtacctgtttttaataagtgtactttttttcccccctccgtgaatgtagatcataagcaaacaaattgcctgttctaaatgaactttacatatattttaaatgaatgtatgtacttacgtataaatgtctttatatagcttgaataaaaacactgctcattaaaaaaaaaaaaaa

SEQ ID NO: 276 - DNA, 3352 bp, Homo sapiens
ggggcgtggcgccggggattgggagggcttcttgcaggctgctgggctggggctaagggctgctcagtttccttcagcggggcactgggaagcgccatggcactgcagggcatctcggtcgtggagctgtccggcctggccccgggcccgttctgtgctatggtcctggctgacttcggggcgcgtgtggtacgcgtggaccggcccggctcccgctacgacgtgagccgcttgggccggggcaagcgctcgctagtgctggacctgaagcagccgcggggagccgccgtgctgcggcgtctgtgcaagcggtcggatgtgctgctggagcccttccgccgcggtgtcatggagaaactccagctgggcccagagattctgcagcgggaaaatccaaggcttatttatgccaggctgagtggatttggccagtcaggaagcttctgccggttagctggccacgatatcaactatttggctttgtcaggtgttctctcaaaaattggcagaagtggtgagaatccgtatgccccgctgaatctcctggctgactttgctggtggtggccttatgtgtgcactgggcattataatggctctttttgaccgcacacgcactggcaagggtcaggtcattgatgcaaatatggtggaaggaacagcatatttaagttcttttctgtggaaaactcagaaattgagtctgtgggaagcacctcgaggacagaacatgttggatggtggagcacctttctatacgacttacaggacagcagatggggaattcatggctgttggagcaatagaaccccagttctacgagctgctgatcaaaggacttggactaaagtctgatgaacttcccaatcagatgagcatggatgattggccagaaatgaagaagaagtttgcagatgtatttgcagagaagacgaaggcagagtggtgtcaaatctttgacggcacagatgcctgtgtgactccggttctgacttttgaggaggttgttcatcatgatcacaacaaggaacggggctcgtttatcaccagtgaggagcaggacgtgagcccccgccctgcacctctgctgttaaacaccccagccatcccttctttcaaaagggatcctttcataggagaacacactgaggagatacttgaagaatttggattcagccgcgaagagatttatcagcttaactcagataaaatcattgaaagtaataaggtaaaagctagtctctaacttccaggcccacggctcaagtgaatttgaatactgcatttacagtgtagagtaacacataacattgtatgcatggaaacatggaggaacagtattacagtgtcctaccactctaatcaagaaaagaattacagactctgattctacagtgatgattgaattctaaaaatggttatcattagggcttttgatttataaaactttgggtacttatactaaattatggtagttattctgccttccagtttgcttgatatatttgttgatattaagattcttgacttatattttgaatgggttctagtgaaaaaggaatgatatattcttgaagacatcgatatacatttatttacactcttgattctacaatgtagaaaatgaggaaatgccacaaattgtatggtgataaaagtcacgtgaaacagagtgattggttgcatccaggccttttgtcttggtgttcatgatctccctctaagcacattccaaactttagcaacagttatcacactttgtaatttgcaaagaaaagtttcacctgtattgaatcagaatgccttcaactgaaaaaaacatatccaaaataatgaggaaatgtgttggctcactacgtagagtccagagggacagtcagttttagggttgcctgtatccagtaactcggggcctgtttccccgtgggtctctgggctgtcagctttcctttctccatgtgtttgatttctcctcaggctggtagcaagttctggatcttatacccaacacacagcaacatccagaaataaagatctcaggaccccccagcaagtcgttttgtgtctccttggactgagttaagttacaagcctttcttatacctgtctttgacaaagaagacgggattgtctttacataaaaccagcctgctcctggagcttccctggactcaacttcctaaaggcatgtgaggaaggggtagattccacaatctaatccgggtgccatcagagtagagggagtagagaatggatgttgggtaggccatcaataaggtccattctgcgcagtatctcaactgccgttcaacaatcgcaagaggaaggtggagcaggtttcttcatcttacagttgagaaaacagagactcagaagggcttcttagttcatgtttcccttagcgcctcagtgattttttcatggtggcttaggccaaaagaaatatctaaccattcaatttataaataattaggtccccaacgaattaaatattatgtcctaccaacttattagctgcttgaaaaatataatacacataaataaaaaaatatatttttcatttctatttcattgttaatcacaactacttactaaggagatgtatgcacctattggacactgtgcaacttctcacctggaatgagattggacactgctgccctcattttctgctccatgttggtgtccatatagtacttgattttttatcagatggcctggaaaacccagtctcacaaaaatatgaaattatcagaaggattatagtgcaatcttatgttgaaagaatgaactacctcactagtagttcacgtgatgtctgacagatgttgagtttcattgtgtttgtgtgttcaaatttttaaatattctgagatactcttgtgaggtcactctaatgccctgggtgccttggcacagttttagaaataccagttgaaaatatttgctcaggaatatgcaactaggaaggggcagaatcagaatttaagctttcatattctagccttcagtcttgttcttcaaccatttttaggaactttcccataaggttatgttttccagcccaggcatggaggatcacttgaggccaagagttcgagaccagcctggggaacttggctggacctccgtttctacgaaataaaaataaaaaaattatccaggtatggtggtgtgtgcctgtagtcctatctactcaagggtggggcaggaggatcacttgagcccaggaatttgaggccacagtgaattaggattgcaccactgcactctagcccaggcaacagaacaagaacctgtctctaaataaataaataaaaataataataataaaaaagatgttttccctacaa

SEQ ID NO: 277 - DNA, 3917 bp, Homo sapiens
agaagtctgtccgcgagctgtcagcgcgggcgggaacgccgcggggcgcggggtgggcgcggccgacctggtccctgagccggccggcgaccccggacctcccgcgcgccccgcacccgaccggctcagccggccggcagcgtaacacgccctacgctcgcttgctcgccggcctcagggcaggcaggcgggcgcgggagaccccgccggggccgagacttggggcgggcgacgaggaccaggttacggcctcctcgccatgtcctcggcctgcgacgcgggcgaccactaccccctgcacctcctagtctggaaaaacgactaccggcagctcgagaaggagctgcagggccagaatgtggaggctgtggacccacgaggtcgaacattattgcatcttgctgtttccttgggacatttggaatctgctcgagtcttactccgacataaagcagatgtgacaaaagaaaatcgccagggatggacagttttacatgaggctgtgagcactggcgatcctgagatggtgtacacagttctccaacatcgagactaccacaacacatccatggcccttgagggagttcctgagctgctccaaaaaattctcgaggctccggatttctatgtgcagatgaaatgggaattcaccagctgggtgcccttggtttctagaatatgcccaaatgatgtctgtcgcatctggaaaagtggtgccaaactgcgcgtcgatatcacattgctgggatttgaaaacatgagctggataagagggaggcgtagttttatatttaagggagaagacaactgggcggagttaatggaagtcaaccatgatgacaaagtggtcaccaccgaacgcttcgacctttcccaagaaatggagcgcctcactctggacttgatgaagccaaaaagcagggaagttgagcggcggctcacaagccctgtcattaacaccagcctcgatactaaaaatattgcttttgaaagaactaaatccggattctggggctggaggacagataaagcagaagttgttaatggttacgaagcaaaggtttacacagtaaacaatgtgaatgtgatcaccaaaatacgcacagaacatctgaccgaggaggaaaaaaagagatataaagcagacaggaacccgctggaatctttgctgggaactgtggaacaccaatttggtgcacaaggggacctcaccacggaatgtgctactgcaaacaaccccacagccatcacgcctgatgagtacttcaatgaagagtttgatctgaaagacagggacattggaaggccgaaagagctgacgattagaacacagaagtttaaagcaatgttgtggatgtgtgaagagtttcccctctctctggtggagcaggtcattcccatcattgacctaatggctcgaacgagtgctcattttgcaagactgagagatttcatcaaattggaattcccacctggatttcctgtcaaaatagaaattcccttgtttcatgtcttaaatgcacggattacatttggaaatgttaatggctgtagcactgccgaagaatctgtatctcaaaatgtggaagggacccaggctgattcagcttcccacatcacaaactttgaggttgatcaatctgtgtttgaaattcccgaatcttactatgttcaagacaatggcagaaatgtgcatttgcaagatgaagattacgagataatgcagtttgccatccagcaaagtctgctggagtccagcaggagccaggaactttcaggaccagcttcgaatggagggatcagccagacaaacacctatgacgcccagtatgagagggccatccaggagagcctcctcaccagcacagaaggcctgtgccccagcgccctgagcgagacaagccgttttgataatgacttgcagctagccatggagctctctgccaaagagctggaggaatgggagctccggctccaggaggaagaggctgagctccagcaagtcttacagctgtcactcactgacaaatagacctttcagcctgtgagcctctgcacaaagcagaggctgtgggctgtcacagatgctgtgtcaaccagggccctagggctaagggcctgcaccttgcgtgcatgcagcaggcaacaactgccccttctttatgcagaggtgcagaaccagggactcctgggcccatccaggctgctccctggggtggagaagggaccagggattgcaggccccatctccaggctaaggggaggagagcatcatcactttccattagctgtattggcttgcaggtcacatttttactaccagctttagacaaaaccccaatccccgcaggtttgtagataaatttttatcaaggagtgataacaagacaagttattgcagagtcagggtgcttttatatataagagcagcagccgcctttgtaaagtgtgatctatgagaattggagacacttctttactgttcaccaaagaaatgggtaatctgtgctgatctccttatttttacctttttacagggtttctaggacattgtcattattcttcctccatctatctgattccattccttccacacccagctaaagttagaggagatacatatagaatctattttagattattgttaactatttgcatcaaattaagatacacaaatggccatggatgttgccttagccttaaacattactaatagtttcacatcacctcactgcacgcatcgaaggatctgatttgaatttgtaaaggcaattcttttgagagcaggattctccaggctaaatcaaaggcagctaatcctgtccctgaaggagcagctaggggaacctgaggcttgttcttgaagtgggcaagctggccaaaatattggaacacacagaaccaaaccaggtgtgttctacacctgcatgagtgaaggatttccacgtagacacctaggaagagcccgcatgccctagactcactccagaggaaggattgatttgcaaccagaaagggagctgaaaaccacggagctccatggctcttcattcaaaagggaaaataatgattccacgttgctttttagagttcaaatcaacatctttctggataaatctattttttaacaatctttttattatttgtaaaagatataaaaacaactcccatcagtagcaatacaaggttatacattttaaccagattttctcaggccttttttggatacctttagtagttaactctcttttgtcaaaccctcttgtatataaccatcgcacaacatacagaaccctggggaatacagccaagggcactgctcactgtggcccgtgtattcattcccacaggctgcactgaaataacctggtaaacaacaccctcctccattttgcgtctatttcttctattgtgcttctttggggataggaagagaaacataactactgttccaggtaacgtctgtatcatacagttagtgttgccagtgaaacgttcccagatacaaagaattgtgcttttaattccatttcacaatctgttttgttttttttttttgtcattgtctgaccaaaattccttctgcacatgaggccagtataggcaacgtcacatttgtttgtttcaaatatgcagtgtggtattttgtttactttgcatttaccgtgagcaaagatacttcttggaatggctgcagtgaggccgtgtcattggctcacaaaagtgactcataggtaatttctgtgtttgcattccactgctctgctccctaaggtccttgactttctccccaggaattcacttaaaaagggactgagcattgtgtcaacctgttgcagtgtttttcatatatgtgttcactctaaaaatgcaaataaagactgcttccttagagggtgctcatacaaaaaaaaaaa

SEQ ID NO: 278 - DNA, 2140 bp, Homo sapiens
cgcggcgcatgttcggcgtgtcggtcttcaggcgcctgatgagttcatagttgggcggtggtgtcagcggtttcgctggcgttcgtgggcctcccccggacccacacacggaaacacgcaaccattcggggatccagacgcccgtttacacgcaccacccctgggcgggctgtgcggctcaggccctcccccgggaccggcccgtgtcccgccccgtgtcccgccccgtatttgtgcggcgccagctggccccgcagcctgcggcgcagagaggctgggcttgcaggcgcagtagctccagaggtcgcgctgggctgagagtgcgggccggcagaggctggcggggagcagccggggttatgctgggcaaggattacatgctggccatcattctggtcaactgcgatgatgacttgtggggggaccacagtctggaggtggaggctggcctgcctcctggctggaggaagatccacgatgctgcaggtacttactactggcatgtacccagcggtagcacccagtggcagcgcccaacctgggaactaggagatgcagaggacccaggcacgggaacggaggggatctggggactgcggccccccaaagggagatccttctccagcctggagagttcactggaccggagtaactctctgtcctggtatggtggggaatcctacatccagagcatggagccaggggctaagtgctttgcagtccgctctctgggctgggtagaggtacctgaagaggacctggcaccggggaagagcagtattgcagtcaataactgtatccagcagctggcccagacccgcagccggagccagcctccagatggtgcctggggtgagggccagaacatgctgatgatcctgaagaaggatgccatgagcctagtgaatcccctggaccacagtctgatccactgccagcctctggtgcacatccgtgtgtggggcgtggggagctccaagggccgggacttcgcttttgtggcaagtgacaaagatagctgtatgctcaagtgccatgtgttttgctgtgatgtccctgccaaggccattgccagtgccctacatgggctttgtgcccagatcttgtcagagcgagtagaggtcagtggtgatgcctcttgctgctccccagaccccatctctcctgaagacctgccacggcaagtggagctgctggatgcggtaagccaagctgctcagaagtacgaggcactgtatatggggacactgccagtcaccaaggccatgggcatggatgtgctgaacgaggccattggtaccctcaccgccaggggggaccggaatgcctgggtccccaccatgctcagtgtgtctgactctctcatgactgcacaccccattcaggcagaggccagtacagaggaggagccattgtggcagtgccctgtgcgccttgtgacatttattggtgttggccgcgacccacacacctttggcctcatcgctgacctgggccgtcagagcttccagtgcgcagccttctggtgccagccccatgcagggggactctctgaagctgtgcaggctgcctgtatggttcagtaccagaagtgtcttgtggcctctgcagctcgaggcaaggcctggggtgcccaggcccgtgcccgcctgcggctcaagcggaccagctccatggattccccaggaggtcccctgcccctccccctgctcaaaggaggggttggcggtgcaggggcaacccctcgaaagcggggtgtcttctcttttcttgatgccttccggctgaaaccctctctgctccatatgccctaaacttatctgggaaggctggggaagtaggctctgggtccatgcctaactctgtaccgttttattcctcaaggcctatagcctgtcactccttgaagccttctctgcctgtccctccgatccttgtccaccgtctatttattgcccaatttattgtttatacggatgactgggaggcactgcaccacaacgtaggaccctggctcccctttccttgggtccttgtgttccttgcccctgtccaaccctggacagttggctctacctcagtaacactttatagcaaaatcagtgcaaataaaaatccctcagtgacctcaaaaaaaaaa

SEQ ID NO: 279 - DNA, 8096 bp, Homo sapiens
ggaaaaaaaggaaggcgtgagggcgggcagcagcgacaggatgcttgtttttcgctctaccaaagtcgtctgaaggcgagacagcgggcccagggcgcaggacccaccgcagccccctgggcagtctcctcgccccgcgtccgcgtcgtctccggggcacttagtaaggggtggggagagcttgccctccctcttaagctgaggagaaacacccgaagacaccgcaggagcctgtgaaagtccctaggactccaagtgaggaagtgacactcccaggcgagccggcccgcggctgccagtctgcacggcctcggcacggcggccccggagcggcgcggggtggatctcaggctctgccggcccgcggcccgcggggtccatgcgcagggcccccagcccaagttcttccatcttccgatgcggccccccagagccgcggggcagccggtgatctagcccgggagcccatcttacagcggtgccaagcagaggggcggcagagacggaggggcagcctctttgggactaactcatgaagaacaagggtgctaagcagaagctgaaacgaaagggagccgccagcgcgtttggctgtgacctgacggagtatctggaaagctcgggacaggatgttccatacgttttgaagagctgtgcagaatttatagagactcacggcatcgtggatggaatctatcggctttcaggagtcacctcaaacatacaacggctaaggcaagagtttggctcagatcaatgtccagatctgacaagggaagtgtacctccaggacatccactgtgtgggctcgctttgcaagctctactttagggagctgcccaaccccctcctgacttatgagctctatgagaaattcacggaggcagtgtcgcattgccctgaagaaggccaactggcccgaatccaaaatgttatccaggagcttcctccatcccactataggaccttggaatacctgattcgacacctggcccatatcgcctccttcagcagcaagaccaacatgcacgcccggaacctggccctggtgtgggcgccaaacctcctcaggtctaaagaaattgaagccactggttgcaatggagatgcagccttccttgcagtccgggtccagcaggtggtgattgagttcatattgaatcatgtagatcaaatctttaacaacggtgcacctgggtctctggagaatgatgaaaaccggcccatcatgaagagcctgaccttgccagccctctccctgcccatgaagctggtgagccttgaggaagctcaagcccgcagcctggccactaaccatcctgctcgcaaggaaaggagggagaacagcctgcctgagattgtccctcccatgggcaccctcttccacactgtccttgagttaccagacaacaagcgaaagctctccagtaaatcaaagaagtggaaatcaatatttaacctgggacgttctggatcagactccaaatcaaaactgagtagaaatgggagtgtatttgtgagaggacagaggctctcggtggaaaaggctactatccgaccagctaaaagcatggactcactatgttcagtgcctgtggaaggaaaagaaaccaagggaaatttcaatcgaacagttaccaccggtggatttttcattccagcaacaaagatgcactccaccggcaccggcagctcatgtgacctcaccaagcaggagggcgaatggggccaggaggggatgcctcccggggctgagggtggctttgatgtgagcagtgatcgcagccatctccagggcgctcaggcccggcccccaccggaacagctgaaggttttccggcctgttgaggatccggagagcgagcaaacagccccaaagatgttgggtatgttctacacttcgaacgacagccctagcaaatccgtcttcaccagcagcctcttccagatggagccctcgccgcgtaaccagcgcaaggcgctgaacatctccgagccctttgcggtatctgtgccgctccgcgtgtccgcagtcatcagcaccaacagcacgccgtgcagaacacccccgaaggagctgcagtctctttccagcctggaagagttttcttttcatggatcagagagcggaggctggccagaagaagagaaaccgctgggagctgagacttctgcagcttctgtacctaagaaggcaggtcttgaggatgccaaggcagtacctgaagcaccggggacagtggaatgcagcaaaggcctgtcccaggagccaggcgcccacctggaggagaagaaaaccccagaaagctccttgagctctcaacatttaaatgaattagagaagaggccaaatccggagaaggtggtggaggagggacgagaggctggtgagatggagtccagcaccctgcaggagagccccagggccagagccgaagctgtgcttctccatgagatggatgaagatgatctggccaatgccctgatctggcctgagattcaacaggagctgaaaatcattgaatctgaggaggagctctcatcgttgccacctcctgctctgaagaccagcccaattcagcctattctcgagtcgagtctggggccctttattccctcagagcctcctgggagcttgccttgtggctccttccctgctccagtctccacccctctggaggtgtggactagggatccagccaatcagagcacacagggggcttccacagcagccagcagagagaagccggaacctgagcagggcctgcacccagacctcgccagcctggctcctctggaaatagttccttttgagaaggcatctccacaagcaacagtggaagtaggaggcccaggcaatctgtctcctccactcccacctgctcctccccctccaactcctctggaggagtcaactccagtcctgctttcaaagggcggcccggaaagagaagactcatccaggaaattgaggacagatctctacatagaccagctgaagtcccaagacagccctgagatctctagcctctgtcagggagaggaggcaaccccaagacacagtgacaagcaaaattcaaagaatgctgcttctgaggggaaaggctgtggttttccaagcccaaccagggaggttgagatcgtctcacaagaagaggaggatgtaacccattcagtacaggagccttcagactgtgacgaagatgacactgtgacagacattgcccagcatggcctggagatggtggagccctgggaggaaccccagtgggtgacgagtccccttcactctcccaccctgaaagacgcgcacaaggcccaggtacagggccttcagggtcaccagttggagaagaggctttcccacaggcccagccttcgccagagccattctctagatagcaaacccacggttaaaagccagtggactctcgaggttccctcctccagcagctgtgctaatcttgaaacagagaggaattctgaccctcttcagccccaggcacccaggagagagattactggatgggatgagaaagccctgaggtccttcagagagttctctggcctgaaaggggcagaggctcctcccaaccagaagggaccaagtggtgtgcaacccaacccagcagaaaccagccccatcagcctagcagagggaaaggagctagggacacacctggggcacagcagtccacagattaggcaaggtggtgttcctgggccagagagcagcaaggagagttcacccagcgtgcaggacagcacttcgcctggagagcaccccgcaaagttacagctaaagagcacagagtgtgggcccccaaaagggaaaaacaggccttcttccctcaacttggaccctgccattcccattgctgacctcttctggtttgagaatgtggcctcatttagttcacctggaatgcaggtctctgagccaggagacccaaaggtcacatggatgacctcatcttactgtaaagcagacccctggagggtttactcccaggacccccaggacctggacattgttgctcatgcactgacaggccgccgtaactcagctcctgtgagtgtgtcagctgtgagaacctccttcatggtcaaaatgtgccaggccagggcggtcccagtcatccctcccaagattcagtacacccagatcccacagcccctgccctctcagagctcaggggagaatggggttcagcctctggagaggagccaggagggacccagctcaaccagtgggaccactcagaaacctgccaaagatgattctccctcctccctggaaagctcaaaggaagaaaaaccaaagcaagatcccggagccattaagtcctcaccagtggatgccactgcaccctgcatgtgcgagggacctaccctttctccagaaccaggctcgtctaacctgctctccacccaggatgcagtagtgcaatgcagaaagcgcatgtcagagacagagccatctggggacaaccttctttcttcaaaactagagcgaccatctgggggttctaagcctttccacaggtcaaggccaggaagacctcagagcctaatcttattcagtcctcctttccccattatggaccacctgcccccttcatccacagtgacagattccaaggtcctgctgtcccctatcagaagtcccacccagacagtttcccctggccttctttgtggagagttggcagaaaacacatgggtcacaccagaaggggttacacttaggaataaaatgaccatccctaagaatggccagagactagagacctcaaccagctgtttttaccagcctcagcggagatcagtaattctggatggaagaagtgggaggcaaatagaatgatttcggttcacctgctggtgtctgaaaaaaaccgtgattcatctggaagttattacagggccagcttgccatattccaggcacacgttatcaagtttgggcctattgtggcctctgacttctctttcttcagccttttgaccacttattaattagtccatttgctagaagagtggtcaagggaaaaacgagagatgaaatttagttaagtctatgtgagcaagtgagagaaggttaggtaaggggagaggatggaatgcttgcctccaatgaactttggagcttgtatgtgagtcagattgctcccctattgctattatctattactcttgagagctggctgtcctttgaaagaaagaagtaatgttctttgaaagaaagaaaaatctcttgctgtgtcaaacctcaaaatgttgctattggggttagaaggcctcctctttatgctttttaatgctctttcaaacgtgttcttttagaccagttttctaataagctttgtaaaatgtactatccaaattagaagcggatttggaaatgcaaactaacgtgcacttagatatccaagtgggtgagcttagccactcttacccatgctctttccctggaatccctggagacctgtccaagatgatttccatataccagcatagaaaatcagaatcaagagcaaactctgagactggcacaatccaagaagatttcctggctctggcttttagtaatttgggactccaactgccactgtactggactgtaatttataaatccagtagctacgcagggtggaggctgggctgaggattaccataatgaaatgtactaaatcttcatttaggtatgcaattgtgaagtgaaggcatctgctttctttacagtatcagagtccaagaacaggatgtcaccatagataaaagcctcatacaaaggcagaactacactccaaatttaatgtgtttaaattggtggggcaccagcagaaaatattctagctcagctttactcttcttccacactaggctgggcccagcaatacaggagaggatgaagggaggagctccaggaggcgagggaagagccctagcagggcggccatcacaaccactcactgagagttgcccttcttaaaaatgtattttattttagccagtgggtcccttcctttctcctttcctctctactgctcaagaacagatttgaggccaggtgcggtgcctcacatctgtaatcccaacactttgggaggctgagatgggtggattgcttgagcccaggagttcaagaccagcctgggcaacacagcgagaccccatctcttaaaaaataacagacttgaggaacccctctcccttccataattcccctcatccaccgcccactccaggcactcactcaaacttgctcttcaactctgtatacaagcagaagcaataaaccaatctgattttcttttcaattatttataactttcaatggttctttcctttccagctggcgagagaaaggagaactaatatacctgctggcagatttttggtgctgcccaaaaaaggacttcacagggcatctcttctcaggttcaagcctggctgaattctgcccagaagctcagtcattgcagaaatttctctaagggctgatagtacctctgggtaggcgtcacaaccaaggctggttctgggcttagtgggggctgagatgaagttacctcctccaatgagaaattgggagctgatgccctgcaacagatatatattcctctctctctctgtctctctatctctctcctccctctccctccctccctccccgccaataagccttacaaacagttttgaaatcttgttctgtaccttttaagccagtgtctgtggcgagggtgactggcaagtcagctgatgagttctgccttctgagagcactgagtgagcaaggcctttcatcagtgttttggccttctcattgggtgaggaagacattgaaccaacagccaacgagatatgaacctgtaagaaaaaagtcctagaatatagtatttttccccaggccagcaaagtgaagaaatacagtggtgacagatgagaaaggccatgttcaagagatctgaaaagtacattcctgccttatcagaaaatgtgtcagacaggttttatgtcagcctcagtgctcctgcggtgtcgacgctctgataaggaccatgttccagttagaatgcgagggagggaaagagctgcactttgcttcaccatcagaactctgagccaaataatgaatatgtaaactattttatgattattttaaatgtttgtttggtaacatttataagatctatttttatttggggatagactgagaagccaccatttacatattaacaagtgacttcagttctaagggttgagatgcctgtgtggatttataaaatggttgcaagatcttttagactctgacatttatagcatcaccttcaggaacacagttctggggatgtcatcatgagacacactgacagctgtggagatagtccctactctcagctttccttgctagtcaagtccaaaaggccttagaagctgactcaccttctcagccagagtcctgctgctcaagtgtggacctccactttgactctcacccagcctgccagccatcacaaaggctttcataaacttcctgtggtctgggctagcctggcactgatgaaattccattctaaagaaagaaaactcatattcctcccccccacaaattgttcccccaaatgctctgggattacctatttcaccactcatttgagtctccgaaaaatgaactccctgagaatggctggatgggaatcagatagtctgcttccattcaggagagggacagaacaggagctgctgtgtttaggaggatttacctggtgccctagaaagggctatgcaatcaaattctcaagggctccttcaaatcagctatcagtcctcaaaatgggggttgctgatgttaaatgatggatttgcagtgaaacgcatgcatgtactgacgttttctttcagcattagtggttgcttaagaaaatagtaacctatattttctgctacacttggaatatgaagaaatctgaacaagaaccccattaagacacctaacctaatctaaaccctaaaattcaaaatattgtccaagtcaaaagtctagactctgaggacattaaaaatgtaaatatcaaaaaaaaaaaaaaaaaa

SEQ ID NO: 280 - DNA, 5450 bp, Homo sapiens
aaaaaggcagcctatgggctgagcgggggatggggagagaagagggatagggccagcaaggcagggatcgaacgagtgtctggcagccgggagcccagcgaagagagcgagcaagcttaggaaaacgagcgaagtaaagggagtaggggagactgagactgaccggtagccaggcaggcggacggacgcacgcccggacagactgagcaggcgccggagaaccactcacaggttccccccgcctttccctttgaaagctaggattttgcctttcccgtggcgcccgagagagaatgctggactctgccgacttcagcgcaagctaagatttctcagctagggacaaacgatcagcccaatcctgagaaggggggaaccaagcaccccgtccccatccccctcccctcccccgactaaactcgggcgccaaacccagcccttctctaaccaccctacttcctcctctcctttctagcatggtggctgtatggacagtctgacagaacagagactgacatctcccaatctgccggccccccacctggaacactacagtgttctgcattgcaccatgaccctggatgtgcaaactgtagtcgtttttgccgtgattgtagtcctcctgcttgtcaatgtcatactcatgtttttcctgggaacgcgctgaatggagtccagccacctgagctgtcgcgaactctcgctttgatttcatcccgagagccaccgagaaaaaaaaaaaatcacagacagagacagggaaagagagagaaagaacaagctttcttactcaggggggaaaacgttttgagcttcaacatggcctcgctgtgatatgtatgacgttgctgatcactggagattccatcgttagtgctgaggcagtatgggatcacgtcaccatggccaaccgggagttggcatttaaagctggcgacgtcatcaaagtcttggatgcttccaacaaggattggtggtggggccagatcgacgatgaggagggatggtttcctgccagctttgtgaggctctgggtgaaccaggaggatgaggtggaggaggggcccagcgatgtgcagaacggacacctggaccccaattcagactgcctctgtctggggcggccactacagaaccgggaccagatgcgggccaatgtcatcaatgagataatgagcactgagcgtcactacatcaagcacctcaaggatatttgtgagggctatctgaagcagtgccggaagagaagggacatgttcagtgacgagcaactgaaggtaatctttgggaacattgaagatatctacagatttcagatgggctttgtgagagacctggagaaacagtataacaatgatgacccccacctcagcgagataggaccctgcttcctagagcaccaagatggattctggatatactctgagtattgtaacaaccacctggatgcttgcatggagctctccaaactgatgaaggacagccgctaccagcacttctttgaggcctgtcgcctcttgcagcagatgattgacattgctatcgatggtttccttttgactccagtgcagaagatctgcaagtatcccttacagttggctgagctcctaaagtatactgcccaagaccacagtgactacaggtatgtggcagctgctttggctgtcatgagaaatgtgactcagcagatcaacgaacgcaagcgacgtttagagaatattgacaagattgctcagtggcaggcttctgtcctagactgggagggcgaggacatcctagacaggagctcggagctgatctacactggggagatggcctggatctaccagccctacggccgcaaccagcagcgggtcttcttcctgtttgaccaccagatggtcctctgcaagaaggacctaatccggagagacatcctgtactacaaaggccgcattgacatggataaatatgaggtagttgacattgaggatggcagagatgatgacttcaatgtcagcatgaagaatgcctttaagcttcacaacaaggagactgaggagatacatctgttctttgccaagaagctggaggaaaaaatacgctggctcagggctttcagagaagagaggaaaatggtacaggaagatgaaaaaattggctttgaaatttctgaaaaccagaagaggcaggctgcaatgactgtgagaaaagtccctaagcaaaaaggtgtcaactctgcccgctcagttcctccttcctacccaccaccgcaggacccgttaaaccacggccagtacctggtccccgacggcatcgctcagtcgcaggtctttgagttcaccgaacccaagcgcagccagtcaccattctggcaaaacttcagcaggttaacccccttcaaaaaatgatacctacagggaggcagataattttaaaataaagtaaataaaattatatttatagatggaccttttttcggagaagcactgttgaaatttatacacacacacacacacagagacccttgagtacacatacacacacacacacacagacacacacacacacacacacacacacacacacacagagagataaggaacaaaagtgttttctgttgttttggggaagtgaaatatgtggttggtaggaagaggtaccaatgacttccaaacatgtgattccgtcttaaaagttttccatttttaccctgtcccccttccctttgctttcagaagttgacatttctattcattgcttttcttgttaagataatctctttactcccctgtgagtgattcactgccttgtcattattacgatagatgtgtttgtattgttttttttctgatgatactgatgttgatgaatttttaattttatttgatgtggtagagttgggaggtttcagggttttttcccctcttttactttccattgaggaagggaatgagctcctttctcctctccttcagccaatcattatcaaatgttccttcagccctgcagttgccccaaataaccttttttcagcatcctctgtcctcagtcatgccagtctggacatgctctgttgtgccctgtgacaaaactgctcagtattcctattgcttttactgtgttttaggtactgtgaagggatcaaaaaaccaaacagaagcaagggagtatcagactatgatgatgctggagtggacttctgttcagggaacattttgcattcaggctgtttcttctatcactggggtttcccatgttgcagcacttctgggtcgttgcaattttgcatctaggagttagtttgatcgagttattctcttttttcaagtcacttttgttataggtctccccctaggcctgtctctcccttagcccaaaagatctgaactggaagcagaggttgagattctgcctcccaggagagggatttacctgccccctagtaccagataggtttagggcagtgatctctacagcaatcagttcagtgtcctggttgtccctgctcccatttacagatgtttgggcagcattgatagaagtatggaggggttcaagacagagcccacctgatcaagatcatcagctaccttcaaattattgacctggacagggtccaagtctgatagtaaccttttacaagaaagaacagggatgggaatggaaagagatagccttgatccacagtattgtacctgcattttctaccaccctaaaattgtgtgagacttctcccattgttaacagattgcatggacaatcttccctggcttctttctttccctctctctttcttctttctcctgccatcctagcacaggaggatttttggtattgatatagttaaagctgttctggcactcaaagaaggccgtgtttccaacatcctctcatcccaggacatttggggcaagtgagttaggggcccaggggcaattttccctctgaataacgtgtctgaggcagggatgctaccctcaggctcgcttttggccagctttttgcttgggaaaatctaacttctttcacaaggaggcaggcttcctatggatgttggagtacctgtttttcctccacacatagcccttttcatggatagaccttgaacaacaaaaagggtataagggaataaggatgaactctgctgtgaagagcaagccactgtagtgaggaatgtggagactgggagtctgtcctaaaccccatgggagaagacttcatcatgacaggacttcagcttaccaagcagcagccatagctgtgtggaggcttcagcatagctagcatgtttactgctctatgcctcctgatccagaccaggcattgcccagcctgggaatcttttctttgtgggaatcaaattacaagctatttaagtttatattccatcacaaccaagtcagacttgtattataagtcaaggatgagcctgatctggggagagggccggggctcgggactggccaccactgttcagcacatgacctaactacgtaagcctctttggcaagggtcctggtgcccagcacccaggctaaaatatcctgtctggcagagtgttttggtagctatgcaggcctcccttcagtgtacctctttttccaacttctcactcctccttactaggcttggccttgacatgcttcttcgagggttggcagcacaccgggaggggatgcttggacaagtttctgggcctacatttcttgactaggccctctcatttcctccctccttggggcttctgcccagggctccaggatcagggatattacttctcaacccgcacttctcctctactgaacccactggcatcacctgatgccactaatttgtgaacaacaagaaatcatttccccattggttggagtattccctcagcctatagcatcaaagcagaccagtggccaacagccccaaggggagcccaattaaatacctgggttcagtatcctaacctgttatgtcctgacagcaatggtaaccccagtaattctgtaatgttgtaatttccgcatggccctgagctcccttttcctcaactcagtgaggccaggatttgctctccaaaaggctttgctagtgtgttcaatgggacctgctgtggggagtcctaagacagacatctaattattctctctttttccccccctctctatgtgtatatttctaatggatctataagaacagcaacaagagagttctaacaattctagtgtgaagccaaatagtgatcttttagtgctttggggatggggtgggctggggtggatggatgggcaacagtgactttgattacccttgctgctctgcatttgccagtttattcttttgtttcttttatctgactgactctgtcaaacaagtgtcaaagttgtgtgttaaaaaatgtttaacaaaaaaaatgttgtaatgacacaaagccttatgaaaatatttatggagttcaataaaagaagtaaaaagac

SEQ ID NO: 281 - DNA, 4283 bp, Homo sapiens
ctggctggcggtccagccccgcggcgccgcttccggtgcgggccccgccccggctgtggcccccggctgcggaggagtccgagacgcagctgccgcgccggggcctgagctgccgcctcctccgccgcccgaaaacccggagtgccccgcacaggtttagacccagtgtgcctggtgggctgtgcccaggttcagagtcatgccactctgtgggtgaagcttgaggcaaaaatggagccacttcagcagcagcagcagcagcagcagcaacaacagaagcagccacacctggctcctctgcagatggatgccagagagaagcagggccagcagatgagagaagcccagttcttgtatgcccaaaagctggtcacacagccgactctcctttccgccacagctgggagaccttctggcagcactcccttaggtcccttagccagagttccacccaccgcagcagtggcccaagtgtttgaacggggcaacatgaactcagagcctgaggaagaggacggaggtttggaagatgaggatggggatgatgaagttgcagaggtggctgagaaagaaacccaggctgcttcaaaatattttcatgtgcagaaagtagctcgccaagatcccagagtggcacccatgtccaatctacttccagcaccagggctcccaccacatggacaacaagctaaagaagaccataccaaagatgcttccaaggcctcaccttctgtctccacagcaggacagccgaactggaatctggatgagcagctcaagcagaatggtggtttggcctggagtgatgatgcagatggaggccggggaagagagatctctcgagattttgccaagctgtatgaactggacggtgatcctgaaaggaaagagttcctggatgacctcttcgtctttatgcagaagagggggacccccatcaaccgaatccccatcatggccaaacagatcctggacctgtacatgctgtataagctggtgaccgagaagggaggcctggtggagatcatcaacaagaagatctggagggagatcaccaaaggcctaaacctgcccacatccatcaccagcgccgccttcaccctcaggacgcagtacatgaagtatctgtatgcctatgagtgtgagaagaaagccttgagttccccagccgagctccaggcagcaattgatggcaaccgcagggagggccggcggcccagctacagctcctccctctttggctactcacctgctgcggctactgctgctgccgctgccggggcccctgcccttctctccccacccaagatccgctttcccatccttgggcttggctccagcagtggtaccaataccagtagccctcggatatccccagcaaccactctcaggaaaggtgatggagccccagtgacaacagtgcctgtgccaaatcgtctggctgtgcccgtgaccttggcaagccagcaggctggtactcggaccgccgcactggagcagctgcgggagcggctggagtcaggggagcctgctgagaagaaggcatcgaggctgtctgaggaggagcagcgcctggtgcagcaggccttccagcgcaactttttcagcatggcacggcagctccccatgaagatcaggatcaacggcagggaagacagagcagaggcctcggctgcagcactgaacctgaccacgagtagcattgggagcattaacatgtctgtggacatcgatggcaccacctatgcaggtgtgctgtttgcccagaagcctgtggtccacctcatcacggggtctgctccccagagcctcggcagcagcgccagcagcagcagcagctctcactgttcaccaagtcctacctcatcccggggcacccccagcgcagagccctccaccagctggtccctctgatgggcaggacccagcttcccacttgccactctcctgtcgagagtgaaggaagttgatgcacagaatttacctcatctcacagagcccacgtcgacgagcaccatttggccagacattgagagtttggacgtgtccgtctgtccaggctccattcaggtcctgctgtactctgggggcagggagaggctagaggggcaggacagacagcgttgtccaatcagggattgtcctggagaactgggtgggggtctgtgggtgtccagcttcctccagggttccccagccacctcccagctcagggcacagtgtatcgacaatctgtcagccgacgcagggctggaggccctccatttccctccccttttaatttatttccctgaccctgccttctgccatgaccccagggccactagtctcttcccctgtttttaagtcccatgtggggctgccaggagccaagagcatgccttcatgcccttctctgcagagcatgggatggggcccttccagcccactttgcctactgttaggttcctggggtacgggtccctcaaacacaagtcttgaatcagtcctcagggccccagatcccccttctaatagtctgaaggaagaggctgtgagggcagttcagggccagggcccacagggcatctgctgatgggaaggcagagcctcggggctgcccagccctggcacctgcttcacacggaccattctctgaccgcccccgccaaacctcatgctccccacttgcccttattggcctgctttcccaaaaacagcccactcatcctttccccagccctcttcagccctccccagtcctccccagccttcttcagccttcttcagctcagccctcttctatttcttatggggccatcttggcctcaccatccccacacgtgccgatgtcaggttcattgaaatacctcagatttgtaattgttgatgtttgagtcttcaggaagtatttgcatctctgaaatcttttttatatgtgttttgctgacttttgttttttttttattttaaaatttttatcgtagcaccaaagaaatgaaaacagatcacccccaaagccaagcaagtgattgggtaacccggcccctctggcccttccctcaagcccagtgaggaggtgggtggaggcatgcaggggagacgactcagggatcgcgggggcggggaggtggagtggagaggcccgctctcacaccgggtcgggccctgaaactgtaccagttctgaagaccgttttctgccacacccccacccccagctgaccagggaggcagaggacacctccccatcactcagcattcccagctcagggcacaggcaggctggggtcctcgctggccttgccagaggttgagccgccccagggtatgaggagatgaataactccacagctcctcctggaccctgcgcgggagcaggcagctcctgtgctgtaaagaaaattgattcgcttgcggctcacctcagtcgaggaagccctggaatgttcagcagaacaccaccactgtgacatggggctgtggcagtgggagacaccgcgcgtggcgtgggtgtgtgtggcagcgtggctcgcattcagtcctgtgtaggagaggaaagggaatcaaaagcttgagcacaaacagatacctcagcccggtaagctgcagctctgctcaactgcgtcttctctcagccctccacacacactcacccccactcccacacacatacacacacacacacacataccccatctcccgagggctgacctcctctggcctcagcctgcagggtgtgggcagagaagggcatctgggacgtggtgccagtgaggagcccagttggctggcactgggcccatttgaaggtgtctcagacatttggccagtatgtctttctcaggggtttggtcacaaaggatggactcttcccacccagaggatgcagggaaagcacactgtgtctttccggtcattggatcctctccctttccccaggcagctcgcctggccacaccgttggagtgaaccctcactgccctcaaggacaacagcagggtgtcacccagagcccgatgaggggtgccagcaggtgcccccacgagtggggccttggcccaagcagagcttcccctgaaggtgccatcagccagggcagctctgtcccctcctgctctccatcttatatgtattctaaccaggaaaaatgtgatagcacatgggtagcctaggcagtgagtaaatacctcagatgtcctcctgcagcaagtgtctatatgttgtggttattttctatcttacatgttctcgaatgtttatatttcaataaacctctacctcttcacacaaaaaaaaaaaaaa

SEQ ID NO: 282 - DNA, 1602 bp, Homo sapiens
ggctctgcagaggcagcggttggaggcgcggtgggtgtctgcgggggtctcgcggggcggctgcggtgtttcaccgggaaaggctcgaggagagcgcggctcacgagagataacccagctgtgctccctggaaccttcaatttcaaggcctccctgcctctactaggcgccttagctcactatggggaaccacttgactgagatggcgcccactgcctcctccttcttgccccacttccaagccctgcatgtcgtggtcattgggctggactctgctggaaagacctccctcctttaccgcctcaagttcaaggagtttgtccagagtgtccccaccaaaggcttcaacaccgagaagatccgggtgcccctcgggggatcgcgtggcatcaccttccaagtgtgggacgtcggggggcaggagaagctgcgaccactgtggcgctcttatacccgccggacagacggtctagtgtttgtggtggacgctgcggaggctgagcggctggaggaagccaaggtggagttgcaccgaatcagccgggcctcggacaaccagggcgtgccagtgctggtgctggccaacaagcaggaccagcccggggcactgagcgctgctgaggtggagaagaggctggcagtccgagagctagcagccgccactctcactcatgtgcaaggctgcagcgctgtggacggtctgggcctgcagcagggccttgagcgcctctatgagatgatcctcaagaggaagaaggcagctcggggtggcaagaagagacggtgacccaagccccccctccctttcctcccacctagtaggggtctgcacacttggacagcagggtgggaccagcctgtgacctctcagtcagactggggtgcaggacctgtccacctcaatgaaggagagaggagcatggggtgtcccgttttggtgccacactggggtggggatgggagatgggatgtctttgcatatctctctcatcctctctggagaagtgggcgctgcaggactgtggagacgtaaatgtaaactgtgactctacctcgaccctgtttcttatttttcttctctggctaaaaatttttaattggatgtgtttgggggcggggggatggaagtgacttggagaatgtgtttgggatgaaataactatctccccttcctctgtcccccaactggggagtctccccaggctgcttttctaggaataccagtcacatagtttttatttttgtgtctgtgaaagtgccaagaacccctccccacatttgtagatccatgaccctttttataagctgtgtgtgtcctctgtattattgttattaactattttttagcatttgcctgtaagttattaaagactgataactgtagctcttaccttggtctggggcattttcctctccttatcttgccccagagacaattcaagatttctatatggggttgtggcgcagggggagggagatttatcttgaagctgaatttgcaaagcaagcacttataaaaattagattgtgtgttacgggatggcttgtgaaaattataggggggagtggaaaacccctcaagctaaaaaaaaaaaaaaaaaa

SEQ ID NO: 283 - DNA, 3589 bp, Homo sapiens
aggtaggtgggtacagaccgaggggactacgggtcggcgttgggctcagtgggctcgaaacaaagggctgtccggtggggattcgtcgcggcgccttctgagtggtcgggtcgaggcttctcggcctagcagtgccctcgctgcgcgatctcaggcgggttctcctcggctccgcgcagcccgcgccgcggtgggggacccggcgcagcggcacctgctgccgagggaccccgcggcccgccccggtgctcgtgatggggctgatcttcgccaaactgtggagcctcttctgtaaccaagaacacaaagtaattatagtgggactggataatgcagggaaaaccaccattctttaccaattcttaatgaatgaagtggttcatacttctccaaccataggaagcaatgttgaagaaatagttgtgaagaacactcattttcttatgtgggatattggtggtcaggagtctctgcgatcatcctggaacacatattactcaaatacagagttcatcattcttgttgttgatagcattgacagggaacgactagctattacaaaagaagaattatacagaatgttggctcatgaggatttacggaaggctgcagtccttatctttgcaaataaacaggatatgaaagggtgtatgacagcagctgaaatctcgaaatacctcacccttagttcaattaaggatcatccatggcacattcaatcctgctgtgctctcacaggagaagggttatgccaaggtctagagtggatgacctcccggattggtgtgagataacttttttgcttgaaagagactgctctatttattctgtgacatgaacattttttcctagtacctttggctgctaaggcagcagcatgtttaatttataacaacacaaacctctgagagcaacacttgaatcaagtgcagctgaactggaacataaaagattttttcttaactttttttttttaacacactaatcttcagttggatgaatgtaatgtataactatgttttcagcaacaattcttctgtttattctaattaatcagtgactgccttgtaagaaatgtttgtcatatgcgtgatgtcttctgaaatattcttataaccttaatgaccaattgctttcaattcttgaccagcactccctcccaaccagagaattactggtttgatagagtagtcttggaaaccatcaggtactgcctgcagacttctccagcactaaatatatttgttccctctataaaccattcatctttcggacagaacttactgtaaagaaagaaatctgcctagaggatatatgtaaggaagattccacatcatgagtacttgccttttaactttcccccacattactgttgagtcatggaataatgtttaagttgttatttgcatggaaattaagtaggctgtttatttatctaaaggaatcaagtccactcttctgcctgcaacatttgttcaaaaactaaccaaggtaaaatatttatttgaaagcccaactttgatgttaaatattcttgaataaatctgttattttaagaatatcacattattcaatgcatataaaactatcagaagttagtaaatcataccagcactaaaaataagacaattggaatatattttagcatcagtttacaaacaactttattatcaacagaaattttagctcttttctttgcaagatatatcacagctgctttgggcagtagctgaagccgaagtatgaacagtccattttgtttcttaaaatttgaagtcgtgtctgtcatagcatttttactaccagcagtatgttacttaaaaaactacatggctttccttgaatttatttgacggtattatgtaatagacttgaaacaattgccatctttgtagttatgccttgggttctaaaatgttataggaaactgctgaattgaatcctagcttttagaatattaataggagactcaaagttaatattcttaacaacttaaaattaaaaaaagtcataatctatcaaaagtttatttattggatggcattaaaacatttttgaggcagttgtctaatatgaacaataatctaaacaatatattccttaaattaagaggaaagacaagtgtcgtatttcgatcctgtttattcaaatgtgtgattttgctgaaatgaaagggataaaatgaatacttagagaataatacttcatttttgcagtactttttaattttgataaaaaagatacaaagttcataatatcaaaatatgtgttcaaaattggtattttaattttaatatttttgtaagttgatttaaattttgctcttttttcaggtgtgcttggtttattatatttagtcaagttaatttagtcgaatgtggtaacatttttctgatttatctttagttggagcacacccttgaactgaacagtggccaaaggaaagctttctgggctttggaaagtagttgtttaactttgttttaagccgttttcttagtgattctgtatcaagtagaggataagtgtagtttaacttagtttttaatataacccataatcaagaacatgagcgaaaagcagacataaatcgatatggatggtttgtggtgtgtgtgggatgtgggggaattaagaaaatgccatttacctaagcacagtttgcctgaatttctgcttggttgtgttgtttaccgtaagtactgagggtagtttccctaagtctgtcctgagaaaaagcatacttagtactcctgtatttgttcttatgaaatgactatctgccttcttgtatctagtaagattggctggctcaattttcttctgtcaaattatatggttattttttatattaccacatcagcattatattaaaagtgtttttaatagttgattgtattttgccaactactagtatagactcaaatttgctatttaatttttaaaatacaatttattttgtaaatcctttaaaaaatatttggttagttttggattagaaatgatttatgttagccatgtgttgaagatgaaattggcatcagtgtagacggtgctgattgggaaaagttcatgattaggaaattcatgtaagactttttaagagtattttttaggttttcactcaatctttcctgtcacagtaacgtgaaaactgattattctttactccaagagaatgttttaacccaagcaagtatctaatactagagcattggttctgacattcattgtaaatcagtgaactgtaagatactgtctaaaaaatgtacatttgtaattagtgcctttattcatattttgaaataagttcttagttttatattatacctgttctttagaagtcatgttagcagctaattatttcagtgatgaaataatttgtgttttatatcccccttcacctccatgtattggttagcacagtttatagtaagtgaaaagcaagggacccacctacattaccttcaggagactgttctaccttttaatttgaaaacaaggaaattaaattttaacagaaatcttttaagtatgttataaccaaagtgttcaattatccttgcaagttcaaatacagcatttttct

SEQ ID NO: 284 - DNA, 4689 bp, Homo sapiens
ctggagagaaaagagggaggaggcaaaagaactcggagtgccaaagctaaataagttagctgagaaaacgcacgcagtttgcagcgcctgcgccgggtgcgccaactacgcaaagaccaagcgggctccgcgcggaccggccgcggggctagggacccggctttggccttcaggctccctagcagcggggaaaaggaattgctgcccggagtttctgcggaggtggagggagatcaggaaacggcttcttcctcacttcgccgcctggtgagtgtcggggagattggcaaacgcctaggaaaggactggggaaaatagccctgggaaagtggagaaggtgatcaggaggccggtccactacggcagtttatctgtctgatcagagccagacgcgacgcgtccacttcgcagttctttccaggtgtggggaccgcaggacagacggccgatcccgccgccctccgtaccagcactcccaggagagtcagcctcgctccccaacgtcgagggcgctctggccacgaaaagttcctgtccactgtgattctcaattccttgcttggtttttttctccagagaacttttgggtggagatattaacttttttcttttttttttccttggtggaagctgctctagggaggggggaggaggaggagaaagtgaaatgtgctggagaagagcgagccctccttgttcttccggagtcccatccattaagccatcacttctggaagattaaagttgtcggacatggtgacagctgagaggagaggaggatttcttgccaggtggagagtcttcaccgtctgttgggtgcatgtgtgcgcccgcagcggcgcggggcgcgtggttctccgcgtggagtctcacctgggacctgagtgaatggctcccaggggctgtgcggggcatccgcctccgccttctccacaggcctgtgtctgtcctggaaagatgctagcaatgggggcgctggcaggattctggatcctctgcctcctcacttatggttacctgtcctggggccaggccttagaagaggaggaagaaggggccttactagctcaagctggagagaaactagagcccagcacaacttccacctcccagccccatctcattttcatcctagcggatgatcagggatttagagatgtgggttaccacggatctgagattaaaacacctactcttgacaagctcgctgccgaaggagttaaactggagaactactatgtccagcctatttgcacaccatccaggagtcagtttattactggaaagtatcagatacacaccggacttcaacattctatcataagacctacccaacccaactgtttacctctggacaatgccaccctacctcagaaactgaaggaggttggatattcaacgcatatggtcggaaaatggcacttgggtttttacagaaaagaatgcatgcccaccagaagaggatttgataccttttttggttcccttttgggaagtggggattactatacacactacaaatgtgacagtcctgggatgtgtggctatgacttgtatgaaaacgacaatgctgcctgggactatgacaatggcatatactccacacagatgtacactcagagagtacagcaaatcttagcttcccataaccccacaaagcctatatttttatatattgcctatcaagctgttcattcaccactgcaagctcctggcaggtatttcgaacactaccgatccattatcaacataaacaggaggagatatgctgccatgctttcctgcttagatgaagcaatcaacaacgtgacattggctctaaagacttatggtttctataacaacagcattatcatttactcttcagataatggtggccagcctacggcaggagggagtaactggcctctcagaggtagcaaaggaacatattgggaaggagggatccgggctgtaggctttgtgcatagcccacttctgaaaaacaagggaacagtgtgtaaggaacttgtgcacatcactgactggtaccccactctcatttcactggctgaaggacagattgatgaggacattcaactagatggctatgatatctgggagaccataagtgagggtcttcgctcaccccgagtagatattttgcataacattgaccccatatacaccaaggcaaaaaatggctcctgggcagcaggctatgggatctggaacactgcaatccagtcagccatcagagtgcagcactggaaattgcttacaggaaatcctggctacagcgactgggtcccccctcagtctttcagcaacctgggaccgaaccggtggcacaatgaacggatcaccttgtcaactggcaaaagtgtatggcttttcaacatcacagccgacccatatgagagggtggacctatctaacaggtatccaggaatcgtgaagaagctcctacggaggctctcacagttcaacaaaactgcagtgccggtcaggtatccccccaaagaccccagaagtaaccctaggctcaatggaggggtctggggaccatggtataaagaggaaaccaagaaaaagaagccaagcaaaaatcaggctgagaaaaagcaaaagaaaagcaaaaaaaagaagaagaaacagcagaaagcagtctcaggttcaacttgccattcaggtgttacttgtggataagcacaaatatttcctgtttggttaaactttaatcagttcttatctttcatctgtttcctaggtaaaccagcaaatttggctcgataatatcgctggcctaagcgtcaggcttgttttcatgctgtgccactccagagacttctgccacctggccgccacactgaaaactgtcctgctcagtgccaaggtgctactcttgcaagccacacttagagagagtggagatgtttatttctcttgctcctttagaaaacgtggtgagtcctgagttccactgctgtgcttcagtcaactgaccaaacactgctttgaattataggaggagaacaataacctaccatccgcaagcatgctaatttgatggaagttacagggtataccatccgcaagcatgctaatttgatggaagttacagggtagcatgattaaaactacctttgataaattacagtcaaagattgtgtcacctcaaaggccttgaagaatatattttcttggtgaatttttgtatgtctgtcatatgacacttgggttttttaattaattctattttatatatatatatatgtttcttttcctgtgaaaagctgtttttctcacatgtgaacagcttgcacctcattttaccatgcgtgagggaatggcaaataagaatgtttgagcacactgcccacaatgaatgtaactattttctaaacactttactagaagaacatttcagtataaaaaacctaatttatttttacagaaaaatattttgttgtttttataaaaagttatgcaaatgactttattttatttttatttcctgcataccattagaataattttatttcatttcttcaaattaccaagcactgtaatactataaattaatgtaatactgtgtgaattcagactataaaaaacatcattcagaaaactttataatcgtcattgttcaaccaagattttgaatgtaataagatgaatatattccttacaaattacttggaaattcaatgtttgtgcagagttgagacaactttattgtttctatcataaactatttatgtatcttaattattaaaatgatttactttatggcactagaaaatttactgtggcttttctgatctaacttctagctaaaattgtatcattggtcctaaaaaataaaaatctttactaataggcaattgaaggaatggtttgctaacaaccacagtaatataatatgattttacagatagatgcttccccttggctatgacatggagaaagattttcccataataataactaacatttatattaggttggtgcaaaactagttgcggtttttcccattaaaagtaataaacttactcttatacaaagtggacactgtggggagatacagagaaatggaagatacggatcctgcctggagtaggtaaccttgcttggaaaccccacatgcaaacgtcatgaggagaattaaaggagtattatcagtaatgaagtttatcatgggtcatcaatgagcatagattggtgtggatcctgtagaccctggtgttttctttgaagtgccctctcctaatgcagaggccttgaagcttacagtatacacttgaaaagtcacagatagctagaattatgatctttgaagttataactgtgatctgaaaatgtgtgtggtggtatgacagcataccattaaatacatttacatcacagctcaaaggactgtgatataatccatttatatcacaactcaaaggactgtgatataatccatttatatcacagctcacagtttctgaaaatgtataaaagaatctataatctagtactgaaattactaaattgggtaagatgatttaaatgattttaattttaacattttatttctagaatatatggctccattttattttatagtgtaaagttgtatttcctaaagtttgtgttttgtcgacagtatcttttaaatgagtcttaaaaataaaggcatattgttcatgttaaaaaaaaaaa

SEQ ID NO: 285 - DNA, 6259 bp, Homo sapiens
cccttcctgcgccgcgctcggctcccgcgcctcgcctggcctggccgctgccgcgggcgagcactgtgcgctgggcagccccgggcccgcgcctcccgcccagccggcgcttcccggtcgcagttcgctttcccacccgagagccgcgagcgcccggccgaacccgcgatggaataatgcccagcggcccgccaggtcccggtcgttttctgatgtgacggctgagacatgagatcttcagcctccaggctctccagtttttcgtcgagagattcactatggaatcggatgccggaccagatctctgtctcggagttcatcgccgagaccaccgaggactacaactcgcccaccacgtccagcttcaccacgcggctgcacaactgcaggaacaccgtcacgctgctggaggaggctctagaccaagatagaacagcccttcagaaagtgaagaagtctgtaaaagcaatatataattctggtcaagatcatgtacaaaatgaagaaaactatgcacaagttcttgataagtttgggagtaattttttaagtcgagacaaccccgaccttggcaccgcgtttgtcaagttttctactcttacaaaggaactgtccacactgctgaaaaatctgctccagggtttgagccacaatgtgatcttcaccttggattctttgttaaaaggagacctaaagggagtcaaaggagatctcaagaagccatttgacaaagcctggaaagattatgagacaaagtttacaaaaattgagaaagagaaaagagagcacgcaaaacaacatgggatgatccgcacagagataacaggagctgagattgcggaagaaatggagaaggaaaggcgcctctttcagctccaaatgtgtgaatatctcattaaagttaatgaaatcaagaccaaaaagggtgtggatctgctgcagaatcttataaagtattaccatgcacagtgcaatttctttcaagatggcttgaaaacagctgataagttgaaacagtacattgaaaaactggctgctgatttatataatataaaacagacccaggatgaagaaaagaaacagctaactgcactccgagacttaataaaatcctctcttcaactggatcagaaagaagattctcagagccggcaaggaggatacagcatgcatcagctccagggcaataaggaatatggcagtgaaaagaaggggtacctgctaaagaaaagtgacgggatccggaaagtatggcagaggaggaagtgttcagtcaagaatgggattctgaccatctcacatgccacatctaacaggcaaccagccaagttgaaccttctcacctgccaagtaaaacctaatgccgaagacaaaaaatcttttgacctgatatcacataatagaacatatcactttcaggcagaagatgagcaggattatgtagcatggatatcagtattgacaaatagcaaagaagaggccctaaccatggccttccgtggagagcagagtgcgggagagaacagcctggaagacctgacaaaagccattattgaggatgtccagcggctcccagggaatgacatttgctgcgattgtggctcatcagaacccacctggctttcaaccaacttgggtattttgacctgtatagaatgttctggcatccatagggaaatgggggttcatatttctcgcattcagtctttggaactagacaaattaggaacttctgaactcttgctggccaagaatgtaggaaacaatagttttaatgatattatggaagcaaatttacccagcccctcaccaaaacccaccccttcaagtgatatgactgtacgaaaagaatatatcactgcaaagtatgtagatcataggttttcaaggaagacctgttcaacttcatcagctaaactaaatgaattgcttgaggccatcaaatccagggatttacttgcactaattcaagtctatgcagaaggggtagagctaatggaaccactgctggaacctgggcaggagcttggggagacagcccttcaccttgccgtccgaactgcagatcagacatctctccatttggttgacttccttgtacaaaactgtgggaacctggataagcagacggccctgggaaacacagttctacactactgtagtatgtacagtaaacctgagtgtttgaagcttttgctcaggagcaagcccactgtggatatagttaaccaggctggagaaactgccctagacatagcaaagagactaaaagctacccagtgtgaagatctgctttcccaggctaaatctggaaagttcaatccacacgtccacgtagaatatgagtggaatcttcgacaggaggagatagatgagagcgatgatgatctggatgacaaaccaagccctatcaagaaagagcgctcacccagacctcagagcttctgccactcctccagcatctccccccaggacaagctggcactgccaggattcagcactccaagggacaaacagcggctctcctatggagccttcaccaaccagatcttcgtttccacaagcacagactcgcccacatcaccaaccacggaggctccccctctgcctcctaggaacgccgggaaaggtccaactggcccaccttcaacactccctctaagcacccagacctctagtggcagctccaccctatccaagaagaggcctcctcccccaccacccggacacaagagaaccctatccgaccctcccagcccactacctcatgggcccccaaacaaaggcgcagttccttggggtaacgatgggggtccatcctcttcaagtaagactacaaacaagtttgagggactatcccagcagtcgagcaccagttctgcaaagactgcccttggcccaagagttcttcctaaactacctcagaaagtggcactaaggaaaacagatcatctctccctagacaaagccaccatcccgcccgaaatctttcagaaatcatcacagttggcagagttgccacaaaagccaccacctggagacctgcccccaaagcccacagaactggcccccaagccccaaattggagatttgccgcctaagccaggagaactgccccccaaaccacagctgggggacctgccacccaaaccccaactctcagacttacctcccaaaccacagatgaaggacctgccccccaaaccacagctgggagacctgctagcaaaatcccagactggagatgtctcacccaaggctcagcaaccctctgaggtcacactgaagtcacacccattggatctatccccaaatgtgcagtccagagacgccatccaaaagcaagcatctgaagactccaacgacctcacgcctactctgccagagacgcccgtaccactgcccagaaaaatcaatacggggaaaaataaagtgaggcgagtgaagaccatttatgactgccaggcagacaacgatgacgagctcacattcatcgagggagaagtgattatcgtcacaggggaagaggaccaggagtggtggattggccacatcgaaggacagcctgaaaggaagggggtctttccagtgtcctttgttcatatcctgtctgactagcaaaacgcagaaccttaagattgtccacatccttcatgcaagactgctgccttcatgtaaccctgggcacagtgtgtatatagctgctgttacagagtaagaaactcatggaagggccacctcaggagggggatataatgtgtgttgtaaatatcctgtggttttctgccttcaccagtatgagggtagcctcggacccggcgcgccttactggtttgccaaagccatccttggcatctagcacttacatctctctatgctgttctacaagcaaacaaacaaaaataggagtataggaactgctggctttgcaaatagaagtggtctccagcaaccgttgaaaggcatagaattgactctgttcctaacaatgcagtattctcaattgtgttactgaaaatgcaacattagcaaagaggtgggttctgttttccaggtgaaacttttagctccatgacagaccagcctgtagttatctgtgtacacagtttacagctacaaaaacctactttggtatttattacagaaaagtgctcagttaaatgtaagtgttattccttcagcaaaatattcactgacccaaaactctttatggcattttacaatgcacacagcctcatgcaagtttagacaagtggatttatactgtcttatgagtgcccgcccctgatatattacctcattatgcaaaaataacatatctttcatgactattttgacaaaagtttaaaacacatatgaagttcaaatttcaggaaccaaggactgccagaaaatattagcctctacattacgcatgcatttagaagcttacctgaaatctgccttttataaaggaatagtatggataagtggaattgtacattttttaaacttgattgccattaaagcagaaattataaggttgcaacaatatttgtttctaatcactggctttctcaagagtatggattgacatattgtgttatgaatgcacatctctcagatgtgttgaagcatccattgcatccattttttattattttcttagttttgttcttggacaaatttaaacttttaaaagattattcaagatgaatttaaaagtcaacccttcacacagtttccctactgtatgtagaatccaggtgctgaaaccaagtgtttcttttcccatgctctttgttaaaccccaattatagataatttttccagtcttaagctctgtccaccttcaagtcaattcataaccaagtttttgaacgctgctatgaattgcactgtgaaaagcactcttccctctcagttttcttttcatcccagccatgtttatcagatccttaagaacattgtatttcagtcttttacatcagtctgaattttggaaaagaatgcaatagttgtactccacagtcagtggaactgttccctgagtccgaggctcatgtgtcattctggcactacatttgcttaaattgctattttggcaacagcacagaaaactaatatttttaagcagagaatcttggcaatgagtgagagatgttaatttcacagaagcacaactcccaacccaacccttaggaaaagccctcttccatcgttacagtgctcagtgaatattaatttagttctgcttaagtggttgctatacaaactttgaatagccacctaataaataaaccttgcatgacaaacctgcaaaatattttatcagctgttattggaaagtgattttaagcaattgcttcctcagtgtcagggcacatgtgaatttccacaccaaacagagcatgaggaaccagttgacatgctgggttgtgactggcagctttagcagcctcggtactgaagccacaccagtgtccggatggaagtctgcatctgaggttgctcagtgtcccggtcattcatttacacattttaacttgcattaaagagctgttcttttctgtggcctagactcttttcactgatctcaaaataaactggtttttttcaaaaaaaaaaaaaaaacaaaaacaaaaaaaaaacacaaaagctgcatgtctaaaattacatggagttagtgtctattctttttccccttttgcagcaacttacacagcatttttaacaccttttttttctagtttttttgttcggttttgttttccatcaggaatttgagttctctctaacccagcttactgtgggacataggaaaactcagtagaaatacctttggtgatcttgttgagtttaagtctgatcttgatcttaaactcagtaagccactatctgcaattttgtacattatatagtattttgaagatatggaaccttatgaaaaaaaaatagcaaattagttctttttcccccagaggggaaagttatgttctgcaaatagtgtgtgtcttattttactgttgaacagcaattgctatttatttttttattgcctagaacttcaacatgttgtataggaatcctgtagtgccactagttaaatgccgaattctcatctggatgttaccatcaaacatcagtacacttgtcatttcacatgtgtttaatgtgacagtttttcagtactgtatgtgttaatttctactttttttaatatttaaaattgcttttaaataaacatattctcagttgatcccaaaaaaaaaaaaaaaaa

SEQ ID NO: 286 - DNA, 2736 bp, Homo sapiens
aggtcccggcgcccagagtcgccgcgcggccgccggtgagccgcatggagccccgggcggcggacggctgcttcctgggcgacgtgggtttctgggtggagcggacccctgtgcacgaggcagcccagcggggtgagagcctgcagctgcaacagctgatcgagagcggcgcctgcgtgaaccaggtcaccgtggactccatcacgcccctgcacgcagccagtctgcagggccaggcgcggtgtgtgcagctgctgctggcggctggggcccaggtggatgctcgcaacatcgacggcagcaccccgctctgcgatgcctgcgcctcgggcagcatcgagtgtgtgaagctcttgctgtcctacggggccaaggtcaaccctcccctgtacacagcgtcccccctgcacgaggcctgcatgagcgggagttccgaatgtgtgaggcttcttattgacgtcggggccaatctggaagcgcacgattgccattttgggacccctctgcacgttgcctgtgcccgggagcatctggactgtgtcaaagtgctgctcaatgcaggggccaacgtgaatgcggcaaagcttcatgagactgcccttcaccacgcggccaaggtcaagaatgttgacctcatcgagatgcttatcgagtttggcggcaacatctacgcccgggacaaccgcgggaagaagccgtctgactacacgtggagcagcagcgctcccgccaagtgcttcgagtactacgaaaagacacctctgactctgtcacagctctgcagggtgaacttgaggaaggccactggcgtccgagggctggagaagattgccaagttaaacatcccgccccggctcattgattacctctcctacaactgaattgcaggtggggtccggaccgtggctgcccccgttgtgcccagcattgcccgggtgagggctctgcctgttcctctgaagcagcgtgattgctgtagatagaacaacgctccttcgagtcccttcctgcgatcctgtttaggcttctctcctggatcctggataatgtttccagggtgttgggaaggcctgcgtctcaggtcacagttgtgggtgtggccctgcgctgttctacagaacctaccctctcaatgggcatgggcccaaccatccagttttcctcttttacggaccatcctcaaaggcactctcaggacagacggcgtggggagcacagaggaggctggcagagctggggactgagggcattgttgctgattctcactcaccggggcagcctgccgcagatgcacaggccccaggtgcaggccaccacctccgggtcggcaccaggactgccctcggtgctcatagggaatggctgggcccacggaaggtcggcctgggatgtggcctgggactgctgctctgctggctgctgtgtggatgcttttcctggagcactttccaaggcatcccccagccccaagcctgcgcgcatctgtcactcagggactttctatgggtctttgtgggggaaggccctggctttgtattccccacaagtagcactgagtttcttaggaaatttgtcttcagtattaggtctccaactcttgtaaaaagtttatatgtaggataaaaaccttttagaggacacgtaggcggtaccactaaggttttggtaatgagccattcaaaccgacagcagtgtgaaggtgtgtcaaggtgtatattctcgtggctcggcattctcagtgcaaaggcctgtttggagactctgtgggaattgtttttcatctgtttctatggttgtcaaatgaattcttcacccaccctacagtttgctaactccttgaagctatcaaattagtaagaccatctatcacatccagcattgtcccagtgctttgagttggacgggaatgggactctgcagccaaggcaggataagaaaatcttgcaatcccgtcctgcagtgatagaaacaggtcgttctgcattataagccataggtggagcattcggtagcgtattcagactgcatgggccggcctaggagtctttgccttcataaattttaagaaccccgcccacaacagggagttaaactggaggactttgcatgattagttcagggatgagtggtttctggggcatctgaggtcaggagtttgaaaccagcctggccaacttgatgaaaccccatctctacccattctggagaacaggtcacgcctgtcctggagacagtgtgccgggaaaagggaacgtggtactcactggatgcacccaggccggcccgagcctcccaccgcagacagtgtggaacagagtgagcctgagctgcccaaggcgatgccctttgtgctgtatgactggaggcctctccgcgtgggtacttgggggtggggccacaaatctggcgaaaaacttcatgctggccgccgtgaggttttactccagcgttcccgccattgtcatggcgggtcttcgtcctaaactgagaagaaaagcattcctgtttgatcaccgccttagttaccagttctggatcagtcagtgtttctgcatggaataacaaccattaaaaaaagcactgggttctgccctttcatctttgtaagagattcttgcctctagcaatgacaacctgtgatgtctcacagtagagcacttagcgcagaatcaggtccccacggctgttgctcaataaaagtggcggaataaagtgcatccctgtgttaaaaaaaaa

SEQ ID NO: 287 - DNA, 5949 bp, Homo sapiens
tggggccgggcgggcggcggcagcggccaggtgcgcagcgagcgctccgagcggcgcgcaccaggcggatgccccagccggggcccagcgaacgccaggtagttccaatttgccagcagaatgagtacagaaagagactcagaaacgacatttgacgaggattctcagcctaatgacgaagtggttccctacagtgatgatgaaacagaagatgaacttgatgaccaggggtctgctgttgaaccagaacaaaaccgagtcaacagggaagcagaggagaaccgggagccattcagaaaagaatgtacatggcaagtcaaagcaaacgatcgcaagtaccacgaacaacctcactttatgaacacaaaattcttgtgtattaaggagagtaaatatgcgaataatgcaattaaaacatacaagtacaacgcatttacctttataccaatgaatctgtttgagcagtttaagagagcagccaatttatatttcctggctcttcttatcttacaggcagttcctcaaatctctaccctggcttggtacaccacactagtgcccctgcttgtggtgctgggcgtcactgcaatcaaagacctggtggacgatgtggctcgccataaaatggataaggaaatcaacaataggacgtgtgaagtcattaaggatggcaggttcaaagttgctaagtggaaagaaattcaagttggagacgtcattcgtctgaaaaaaaatgattttgttccagctgacattctcctgctgtctagctctgagcctaacagcctctgctatgtggaaacagcagaactggatggagaaaccaatttaaaatttaagatgtcacttgaaatcacagaccagtacctccaaagagaagatacattggctacatttgatggttttattgaatgtgaagaacccaataacagactagataagtttacaggaacactattttggagaaacacaagttttcctttggatgctgataaaattttgttacgtggctgtgtaattaggaacaccgatttctgccacggcttagtcatttttgcaggtgctgacactaaaataatgaagaatagtgggaaaaccagatttaaaagaactaaaattgattacttgatgaactacatggtttacacgatctttgttgttcttattctgctttctgctggtcttgccatcggccatgcttattgggaagcacaggtgggcaattcctcttggtacctctatgatggagaagacgatacaccctcctaccgtggattcctcattttctggggctatatcattgttctcaacaccatggtacccatctctctctatgtcagcgtggaagtgattcgtcttggacagagtcacttcatcaactgggacctgcaaatgtactatgctgagaaggacacacccgcaaaagctagaaccaccacactcaatgaacagctcgggcagatccattatatcttctctgataagacggggacactcacacaaaatatcatgacctttaaaaagtgctgtatcaacgggcagatatatggggaccatcgggatgcctctcaacacaaccacaacaaaatagagcaagttgattttagctggaatacatatgctgatgggaagcttgcattttatgaccactatcttattgagcaaatccagtcagggaaagagccagaagtacgacagttcttcttcttgctcgcagtttgccacacagtcatggtggataggactgatggtcagctcaactaccaggcagcctctcccgatgaaggtgccctggtaaacgctgccaggaactttggctttgccttcctcgccaggacccagaacaccatcaccatcagtgaactgggcactgaaaggacttacaatgttcttgccattttggacttcaacagtgaccggaagcgaatgtctatcattgtaagaaccccagaaggcaatatcaagctttactgtaaaggtgctgacactgttatttatgaacggttacatcgaatgaatcctactaagcaagaaacacaggatgccctggatatctttgcaaatgaaactcttagaaccctatgcctttgctacaaggaaattgaagaaaaagaatttacagaatggaataaaaagtttatggctgccagtgtggcctccaccaaccgggacgaagctctggataaagtatatgaggagattgaaaaagacttaattctcctgggagctacagctattgaagacaagctacaggatggagttccagaaaccatttcaaaacttgcaaaagctgacattaagatctgggtgcttactggagacaaaaaggaaactgctgaaaatataggatttgcttgtgaacttctgactgaagacaccaccatctgctatggggaggatattaattctcttcttcatgcaaggatggaaaaccagaggaatagaggtggcgtctacgcaaagtttgcacctcctgtgcaggaatctttttttccacccggtggaaaccgtgccttaatcatcactggttcttggttgaatgaaattcttctcgagaaaaagaccaagagaaataagattctgaagctgaagttcccaagaacagaagaagaaagacggatgcggacccaaagtaaaaggaggctagaagctaagaaagagcagcggcagaaaaactttgtggacctggcctgcgagtgcagcgcagtcatctgctgccgcgtcacccccaagcagaaggccatggtggtggacctggtgaagaggtacaagaaagccatcacgctggccatcggagatggggccaatgacgtgaacatgatcaaaactgcccacattggcgttggaataagtggacaagaaggaatgcaagctgtcatgtcgagtgactattcctttgctcagttccgatatctgcagaggctactgctggtgcatggccgatggtcttacataaggatgtgcaagttcctacgatacttcttttacaaaaactttgcctttactttggttcatttctggtactccttcttcaatggctactctgcgcagactgcatacgaggattggttcatcaccctctacaacgtgctgtacaccagcctgcccgtgctcctcatggggctgctcgaccaggatgtgagtgacaaactgagcctccgattccctgggttatacatagtgggacaaagagacttactattcaactataagagattctttgtaagcttgttgcatggggtcctaacatcgatgatcctcttcttcatacctcttggagcttatctgcaaaccgtagggcaggatggagaggcaccttccgactaccagtcttttgccgtcaccattgcctctgctcttgtaataacagtcaatttccagattggcttggatacttcttattggacttttgtgaatgctttttcaatttttggaagcattgcactttattttggcatcatgtttgactttcatagtgctggaatacatgttctctttccatctgcatttcaatttacaggcacagcttcaaacgctctgagacagccatacatttggttaactatcatcctgactgttgctgtgtgcttactacccgtcgttgccattcgattcctgtcaatgaccatctggccatcagaaagtgataagatccagaagcatcgcaagcggttgaaggcggaggagcagtggcagcgacggcagcaggtgttccgccggggcgtgtcaacgcggcgctcggcctacgccttctcgcaccagcggggctacgcggacctcatctcctccgggcgcagcatccgcaagaagcgctcgccgcttgatgccatcgtggcggatggcaccgcggagtacaggcgcaccggggacagctgatcccttacccccaggctgggatgcggccacaaagcacgtctatttttttatgaaagactctcaggactttgtgtgtgtgtgtgaattgcattcatcacaaagatattgaagacaataaataatctttataacaaactccttgggttggactattaaacaatagcagagccaagaaataggacttttaaaagtcctattattcggccgggcgtggtggctcaggtctgtaatcccagcactttaggaggctgaggaggggagatcacctgaggccaggagttcgagaccagcccagccaacatggtgaaaccctgtctctaccataaattaaaaattagccgggcttggtggtgggcacccgtaatcccacctatttgagaagctgaagcagaagaatcgcttgaacctgggagatggaggttacagtgagccgagattgcgccactgcactccagcctgggtgacagagcaagactctgtcttaagaaaaatttaaaaataggccgggcatggtggctcatgcctgtcatcctagcactttgggaggccaaggcaggtggatcacttgaggtcaggagaccagcccggccaacatggtgaaaccccatctctactaaaaatacaaaaattagctggaaatcgcttgaacctgggaggtggaggttccagtgagccgagatcgtggcactgcactccaacctgagcaacagagtgagacaccagctcaaaaaaaattttttaataataataaaagtcctattattcaactggttatgtacattatggttgaaagggaacgttttaatccagtctcaatccagggcaatagaattacaaagcatgttgtatttcagttcaaatggtattgtattataaaattacagttacattttcctttcggtgatcttcagcataatttcccagaggcccctttttcctccctataggccatcttattaacagattttaaaatttatagtaatgacaaatgacttatcagtgttcatcatctgaaagctaagtggttcgttcaatcactttttcaaagttgatagtagattgcatggtttcatgtttcctcatattggtttattaattctatttaatcaaggaaaataacttcagattccataaagtttcagtttatttttagtttactactaggtgagatagcacattacatacttttactatcaaatattattttagcagcttcccatagtaccaaatgatttgattccctactctcattttttaaagcatataaatatttatgggcttaaaaagggggtttttaaaaactgaggatatcagtaataaattgcagaatattttgcaaagctttcttttggaaagcaaacttttgtgcctgcctatatgcaaagtattttatcagggacttgaacaaagacctcactctttttcacttgtcttatgtcgagagaaaaggttattggcagccacattcctaagactggggaatggtgtgtccttttaaatttgaagataactttaggtaattatggaaactcctcaaagaggagaaagtaatttttttccagacatttttctcattctgtgtctttcacacactagtttccatagttcgagaattctgttttttaccattgggctgtgaatgttcacaatatcagtcctgttgaattcctatgaggtaatcacaatgtgtatatgttcattttctaggtatgataaaagaatgtatggctttttattctgtggaagtaaaatcctgaacgtttacaacttttccttaacttgtaaataaaaaattgtaagttttttctttttttacagaaaacttagcttgtgtaattctgttagtttcagatttctctcctgtttttgcaaattgtgggaaagattgacaatgcaaatgtgtcaaagacatactgttgggtgcaatattaacaattttaaatgcaaatttctttggataaattatttctatattctgtaaatctgagatttaatgtatattttgtttaaaaaaatgatttagtaaaatctttgaaaagtatgatcttctaaagtatttaaaaaaaaaaaaaa

SEQ ID NO: 288 - DNA, 5691 bp, Homo sapiens
aacactcaatgtcggaacgttccgaagatgacgtcggagcgttctcgaatcccgtgtctctcggctgctgctgccgaaggaacagggaaaaagcaacaagaaggaagagcaatggcgacactggatcgcaaagtgcccagtccggaggcgtttctgggcaaaccctggtcctcctggatcgacgccgccaaattacactgctccgacaatgtagatttagaagaggctggaaaagagggtggaaaaagcagggaggttatgaggcttaataaagaagatatgcacttatttggccattacccagcacatgacgacttctatctcgtagtgtgcagtgcctgtaaccaggtcgtcaagccacaggttttccagtcgcactgcgagagaagacacggttcaatgtgtagaccttctccctctccagtgtctccagcctccaatcccaggacatcactagtacaggtgaaaacaaaagcctgtctcagcggccatcactctgccagcagcacctcaaagccattcaaaacgcccaaagacaatctacttacctccagcagcaaacagcacacagtctttcctgcgaaaggatcaagggataaaccatgtgttccagttcctgtagtcagtttagagaaaattcctaacctagtgaaggcagatggtgccaatgtcaaaatgaactccacaaccactactgcagtttctgcctcctccacctcgtcctctgccgtctccacccctcctttaattaagcctgtcctgatgtccaagtcagtgccaccttcaccagagaagatcttaaatggcaaaggaattctgccaaccaccatagacaagaaacaccaaaatggcaccaaaaacagcaacaagccttacaggagactttcagagagagaatttgacccaaataaacactgtggagtattggatcccgagacaaagaaaccttgcacaagatccctcacctgcaagacacattcgctaagccatcggagggcagtcccaggccggaaaaagcaatttgacctcctcctggcagaacacaaagcaaagtcccgggaaaaagaagttaaagataaagagcatctcctgacttccacgagggaaatacttccaagccaatccgggccggcacaggattctctgctagggtcttcagggagctctgggccagaaccaaaagttgcatcccctgcaaaatccagaccacccaactctgtacttcctagaccatcatctgcaaatagcataagcagcagcacatcttcaaatcatagcggccacactccagagcccccactcccaccggttggaggtgacctcgccagccgactgtccagtgatgaaggggagatggacggagccgacgaatccgagaagctagactgtcagttctccacgcaccaccccagacctctggcgttttgctcatttgggagtcgcctcatgggacgagggtactatgtgtttgatagaagatgggatcgttttcgattcgcactaaactccatggtagaaaaacacctgaattcacagatgtggaagaagatccctcctgcggcagatagccccctgccctcgccagcagcccacatcaccacccccgttccagcatccgttttgcagcctttcagcaaccccagtgctgtgtatcttccttcagctcccatcagctcgaggctcacctcttcttacataatgacatcagccatgctctcaaacgcagctttcgtgacatcgccggacccgagcgccctcatgtcccacaccacagctttccctcatgtggccgcaaccctcagcatcatggactcaaccttcaaggccccatccgccgtgtccccgataccagccgtcatcccttccccatcccacaagccatccaaaaccaaaaccagcaaatcctcaaaagtcaaagacctgtccacccgtagcgacgagtctccaagtaacaaaaaaaggaagccacagtcttcgacttcctcctcctcctcctcctcctcctcttccttgcagacatccctctcgtctccactgtcagggcctcacaaaaagaactgtgttttgaatgccagttctgctttgaactcctatcaggcggcccctccctataacagcctgtctgtgcacaactcaaacaatggggtgagcccactcagtgccaaactggagccctcaggacggacctcgctgcccggcggccccgcggacatagtgagacaggtgggcgcggtgggaggcagcagtgactcctgtcccctctctgtgccctcccttgcgctccacgcaggggacctctctctggcctcacacaatgctgtgtcttctctgcccctctcttttgacaaatcagaaggaaaaaagcgtaagaactcgagttctagtagcaaagcctgtaaaatcactaaaatgcctggtatgaatagcgttcacaaaaagaacccgcccagccttctcgcaccggtgcccgatcccgttaacagcacctcctctcggcaggttgggaaaaatagcagcctagctttgtcacaatccagtccttcaagtatatccagcccaggacacagccgacagaacacaaacagaacgggcaggataaggactcttccataacaagactatgaagccacttccacatcaattccaggccacctaatcccatccgaggaggccatggggaggaggagggaggggagtgggctggggggagagtctgttttctgtgcactccctgtgactctggcctttcttcttctttttttaattgaccaatttttagttaaaaaggcaaaagaaggtgaatttgagatttacagaaaacagttccagtgtttggtttccgctgtctttcctttcatttgccatgtttttacattcttccaaatttggggtcactcccctagctcctgatgctgctactgtaccatccttttgctccagccatgagagcagacattgcagaatgttggttccaggttggcatgctctgaagctcttgaactgtagcacaggcagagccctttttcttcctgtcatctccacccgattccttccatccctacgtctaccactctctgggtcctcactggtcttcaaaggacctggctctcataggatcccctcaggattgtgtgcagggagagggggctttgctggggaggagctgggagtggagagttggagggtgggtggggttccctcatccagtttccacagcccaccatggctggagccaaatgctagaagcgagattgagaacagtggccgtttagtgatgtggtttacctaataccactgtccagctgtgcagctcagaaaggataaaccagtcagggacaggggccagaacaggtttgggaaggtggcagcaagcagagcatggtgggtaggagatgatccctaaaaaaactggagactgtggtggtctgagctggtcaggaatctgcagaatcccttccaggaatcagtgtgccagtgcccacagcagggtgagctaggagggagaaatcccaggaaaaaggtcgtgagaacccagaaagccactccatgaggaggcacggtgaccacagctgctaaaggttcttaggctgccttcctgggctaggaagagccccccagggagagcttccacaaaagggtatgtgtcaaaccttttgtcagaataaataatagcatttcccacccacccccatgccctgggccacagggacttggtgggatcagcacacccatggatcagcttttgctgtcttagagacagccatccccatgaaggaatggtaaggacagccactgctcagtgaagaacagccatttggaagagccacgctggagccctgcagccatagaactattcacactggagttttaaaagaaacagcaataccataagctctagtagggaatcataatcaggaaaggaattcacaacataaaataggtgttctgtgctattaatcatgtaactttgtatatgatgtatagcaaagatactgggaggttttgtttcatccttaaatcagaaatgaatgctagtttcatagctgggcagaaccctcatccccaccccaaagttttccttttctttcccgttcccccaacccaaagatcagactactgttaagtttcaccacacaattggaattgcaaagacgggaggcaaatggagtgattttcatcaatggaattgcactgacagtgagtgtttcttataggattactaaattttttaatataaaatgatttgtttaaaaatcaggagttgatattaagtaccaggacattagttcggatgatttcatttttatttctacagtgttaaaagtgcacttatatgctggtttatttacgtcttgggaaaagagactgcaaattgaagggatgattgttactttttctttttttaaaaaaaaaaggttaaggagattttaagacttataaatgtttaagaaattataaacaaggttagaccctttgaaaaaaagtttagaagatattcttaaagtaaatttttatagtgttaattttgtaataatttatgttttactatattacagagctaactgaccagaatagtttcagaaacaatatgaaacttaggaaagtttaagcaatgtttatatttttaaaatgttctttgaattatgtttttattgtacatttcttcagactgaaaagtatgtacatatctttgttatttttgcacaattttgtcttgttcggtttcagaggtctgttgttttttataatttattttgagttgtaaaacttgcaggagtaaaaacaaaaaacaaaatctccacaacaaaataaccctctgatttataaactcttatagtcaaagagggaaaacaaaggttgagagattaagtggctgcttctgagaaataatgtctcaaggactaaaggagcaattcaataggtttagacattgtagctctctacatcttgaattggaagctggaataaagagcccccacccccccccccaccctcatcgaatgctgcttactttgtcaaaagactggctatgaccaaggtgaggatatttctggaaaactgggcaaaaagggaaagcccacagtattcttccttggcagtcaaccacaggtttactttacaatgatgtattaaaaacttgcagcttgaaaaatggaatgcaaataaaaggttctctttgggtttgtcttaatggagttaaactggagcagcctataaaacatttttagggtgatgtcctctgggtccttctgttctgcacacccactcagtcttctctcccagccccttgactgcacacacccctctttgcctgaagatctcctgacttgtcgccagccatagaggctcgaaagctctggttgtgaagcataacgcaatgcatagacctgtcagccataaaaaaaaaaaaaaaaaaaaaaaagcgacttggataacttgtatgccttcttttgtatcaatgtaccaattgtaaataatgctgatcaacctttgtagagaatagtttatacagcatattctattattgctgattctcagtgaactcttgttttaaaaaaggaaaaaaagaaattttctatttacaccttatattttgttatgctgtcggcccatggcactttaacaaaactctgtgggttttacgtagctggtcagtcatggggtatattaaataactgttgttgcacagac

SEQ ID NO: 289 - DNA, 2788 bp, Homo sapiens
ggcgcagcggcagcggcagcagcggcaacaagtgccggaggctagcagagccaagccggagcagtccctgccgccgacaccgccgggccgcccgtccggggcgccgcgcatggagcgtgagctgcggcggtcgccgggctgagccgcgcggagcggccgggacgtggatgtggccgcgatctcccgcccttgcccccgccccgccgagctggagctgctcccggacaagatatgagaaatgagtgttggacgtcgaagaataaagttgttgggtatcctgatgatggcaaatgtcttcatttattttattatggaagtctccaaaagcagtagccaagaaaaaaatggaaaaggggaagtaataatacccaaagagaagttctggaagatatctacccctcccgaggcatactggaaccgagagcaagagaagctgaaccggcagtacaaccccatcctgagcatgctgaccaaccagacgggggaggcgggcaggctctccaatataagccatctgaactactgcgaacctgacctgagggtcacgtcggtggttacgggttttaacaacttgccggacagatttaaagactttctgctgtatttgagatgccgcaattattcactgcttatagatcagccggataagtgtgcaaagaaacctttcttgttgctggcgattaagtccctcactccacattttgccagaaggcaagcaatccgggaatcctggggccaagaaagcaacgcagggaaccaaacggtggtgcgagtcttcctgctgggccagacacccccagaggacaaccaccccgacctttcagatatgctgaaatttgagagtgagaagcaccaagacattcttatgtggaactacagagacactttcttcaacttgtctctgaaggaagtgctgtttctcaggtgggtaagtacttcctgcccagacactgagtttgttttcaagggcgatgacgatgtttttgtgaacacccatcacatcctgaattacttgaatagtttatccaagaccaaagccaaagatctcttcataggtgatgtgatccacaatgctggacctcatcgggataagaagctgaagtactacatcccagaagttgtttactctggcctctacccaccctatgcagggggaggggggttcctctactccggccacctggccctgaggctgtaccatatcactgaccaggtccatctctaccccattgatgacgtttatactggaatgtgccttcagaaactcggcctcgttccagagaaacacaaaggcttcaggacatttgatatcgaggagaaaaacaaaaataacatctgctcctatgtagatctgatgttagtacatagtagaaaacctcaagagatgattgatatttggtctcagttgcagagtgctcatttaaaatgctaaaatagatacaaactcaattttgcatagaaaggtgtattttgaatagttcccatgttgtgttctcacattagagtaatttctatattaaaccatgaaaattgcctttatgagtgatacccatttgagggcctctaaacccttcaatttggtactcacgtgaagagggaaagcggaagatggtaatttttttttatggatgatatggcaggatgattggttctgatcttaccggctagtggtcatttttaaaaaacttgtaccctcttatctgaaatcctgtttctggaatttggccattttaagtgattttgtttgccctcttctataatattcctacttcccataataatgactgatttatttgtaattcaggtatttataaacctattggctacaaagactttgttaaacattatccagtggttttcgtgaaatggaattatgtttatttttatgggatttgggtaaattttaaattgtctagaaaactgaaatttcagttgtcagttgtggaattcagtttttcaattgtggaaatttcctgccaccccaacagtatttttgtgtgttaattaattttgcaaaatgagaatcatggtgtgacactcatctaatttatcttgttgtgatgttatggtcataataaggagaaagagggtttaatttttcttgtatttggtttcctggtggtatcatagtgtaattttagtatttgaaaatcagtgtgattccttaatggccaactgaagattgaattgccgctaacaaccatatcgtgttagtgaattttcaatatggaccaggaaggcatatgtattttgaacttgagtgaaaaggttgaagttacagacttttgcatagatggtttgtcaatttaaaattccagaatttattattgccatattttcacatgctgcttatacaagattattattgagtagtaactgcttccctgtctatgtagaagtgcctgtgtttttatttattgttcagatcaaagaccaaaacattttcttaaatatattttatgtaatattttatttgtatacagtgttgttgatgaaatatttaactagagcatgatattttaaatgttaaggtgtaacatatgttaaataaaactgttatttttgaattttaaaatttgttttttgggggtatgaactactagagtttaaaattctgccaaactattacttatatgtactattgtgtaacatactttcttgaaatatttttgtttatagaattgaaggttcttatcagatgggatactggggactataaacaatggaaataaagccactgtatttttaaaaaaaaaaaaaaaaaaaaaaaaaaaaaaaaaaaaaaaaa

SEQ ID NO: 290 - DNA, 3203 bp, Homo sapiens
cagagctgcgcctgctgctggccgggcgggggacggggccgggaccggagccggagctgcggggcgcaccggctagacgcgcgcgggattctcggcgggcacgccccgcggaccatgagcgtccccagctccgggagcagccgcggcgcgggcggtgcgaggccggccgcgcggcgcctttgagccccagccggaggtccagagatcctgagagcccgagcgcccagcgccgcgccgggagagttgagaattatggctgcaggaaaatttgcaagccttcccagaaacatgccggtgaatcaccagttccccctggcctcatccatggaccttctgagcagcaggtcccctctcgctgagcatcgcccagatgcctatcaagatgtgtctatacatggcacccttccacggaagaaaaaaggtcctcctcccataaggtcctgtgatgacttcagtcacatgggcaccctcccccactccaaatccccacggcagaactcgcctgtgacccaggatggcatccaggagagcccatggcaggaccggcacggcgaaaccttcaccttcagggatccacatcttctggacccaactgtggaatatgtgaagttctccaaggagaggcacatcatggacaggacccccgagaaactgaagaaggagctggaggaggagctgctcctgagcagcgaggacctgcgcagccatgcctggtaccacggccgcatcccccgacaggtgtctgaaaaccttgtgcagcgagatggtgacttcctagttcgtgactctctgtccagccctgggaactttgtcctgacctgtcagtggaagaacctcgctcagcacttcaaaatcaaccggacagttctgcgactcagcgaggcctacagccgcgtgcagtaccagttcgagatggagagcttcgactccatccccggcctggtgcgctgctacgtgggcaaccgccggcccatctcccagcagagtggcgccatcatcttccagcccatcaacaggacggtgcctctgcggtgcctggaggagcattatggcacctccccaggccaggcccgggagggcagcctcaccaagggaaggccggatgtggccaagaggctgagcctcaccatgggtggcgtccaggcccgagagcagaatttgcccaggggaaacctcctcagaaacaaagaaaagagtggtagccagcccgcctgcctggatcacatgcaggacagaagagccttgtccctcaaagcccaccagtcagagagctacctgccgattggctgcaagctgccacctcagtcctcgggtgtggacacaagcccctgcccaaactcacctgtgttcaggacgggaagcgagcctgccctgagcccagcagtggttcggagggtctcctcagacgccagggctggggaggcgctgaggggatcagacagtcaactgtgccctaagcccccgcctaagccctgcaaggtgccgttcctcaaggttccctcgtctccctctgcctggctcaactcagaggccaactactgtgaactgaacccagcgtttgccacaggctgcggcaggggagcaaagctaccctcatgtgcccagggaagccacacagaactgctcacagccaagcagaatgaggcgccaggtccccggaactctggcgtcaactacttgatccttgatgatgatgacagggaaagaccttgggaacctgcggcagctcagatggagaaggggcagtgggacaagggcgagtttgtgacgcccctcctggagactgtctcctccttcaggcccaacgagtttgagtcaaagttccttccccctgagaataagcccctggaaacagcaatgttgaaacgtgcaaaagaactgttcaccaacaacgaccccaaggtcatcgcccagcacgtactgagcatggactgcagggttgctaggatacttggagtctctgaagagatgaggaggaacatgggggtgagctcaggcctggaactcattaccttgcctcacggacaccagctgcgcctggacataattgaaagacacaacacaatggccatcggcattgcagtggacattctgggatgcacgggcactttggaggaccgagcggccactctgagtaagatcatccaggtggcggtggaactgaaggattccatgggggacctctattccttctcagctctcatgaaagccctggaaatgccacagatcacaaggttagaaaagacgtggactgctctgcggcaccagtacacccaaactgccattctctatgagaaacagctgaagcccttcagcaaactcctgcatgaaggcagagagtccacatgtgttcccccaaacaatgtatcagtcccactgctgatgccgcttgtgacgttaatggagcgccaggctgtgacttttgaaggaaccgacatgtgggaaaaaaacgaccagagctgtgaaatcatgctgaaccatttggcaacagcgcgattcatggccgaggctgcagacagctaccggatgaatgctgagaggatcctggcaggttttcaaccagatgaagaaatgaatgaaatctgcaagactgaatttcaaatgcgattgctatggggcagcaaaggtgcacaagtcaatcagacagagagatatgagaaattcaaccagattttaactgccctctcgcgtaaattggaacctcctcctgtaaagcaggcagagctttgataactctccagagaacctttagaatatcttttcaagtttccccagcttcatctttgggaaagcttactgtttttgataaagtaataatgtgcaaatctgacaatatacaagcttttagtatccacaggatattaaacgtgtaaattgcacagagcacacttatttatgaattgtctaaagttactactgattttaaaatgaataatttattattaaggtaactactgctaatgttgatcagcaaatttaagagaagacctagctatgttggctggttgctttctattatcatggtatttgaccattttagttttaattccatgtcagataagtgtaaatagaagagtttaaaagcatgaaacatttcagaaggtatcagttatatgatattctttaaacaaatatgaaaaatgtaaatactcatgaatgaaaatacatctttttgtgaaacagttaaaaaaaaaaaaaaaaaa

SEQ ID NO: 291 - DNA, 1864 bp, Homo sapiens
gcgcccggcgaaaccaccctcccgtgcagccgagcccagccgctctccggccgccgtccccggcggccccatgccccgatgccccgcgggggccatggacgaggggcccgtggacctgcgcacccggcccaaggccgccggactcccgggcgccgcgctgccgctccgcaagcgcccgctgcgcgcgccctccccggagcccgccgctccccgcggcgctgcgggccttgtcgtccccctggaccctctgcgcggcggctgcgacctgccggcggtccccgggcccccccacggcctggcccggccggaggcgctttactaccccggagccttactgcctttgtaccccactcgggccatgggctccccgtttcctctggtgaacctgcctacacccctataccccatgatgtgccccatggaacaccccctttctgctgacatcgccatggccacccgtgcagatgaggacggagacacgcctctccatattgctgtggtgcagggtaacctgccagctgtgcaccggctggtcaacctcttccagcaggggggccgggagctcgacatctacaacaacctacggcagacaccgctccacctggctgtgatcaccacattaccgtctgtggtccggctcctggtgacagctggtgccagccccatggcgctggaccgccatggccagacggccgctcacctggcgtgcgagcaccgcagcccgacctgcctgcgagccctgctggacagcgcagctccgggcacgttggacctggaggcccgcaattatgacgggctcaccgccctgcacgtggcagtgaacaccgagtgccaagaaaccgtgcagctcttgctagagcgcggtgccgacatcgacgcagtggacattaagagcggccgctccccgctcatccacgccgtggaaaacaacagccttagcatggtgcagctgctgctgcagcacggcgccaacgtgaacgcgcaaatgtactccggcagctccgccctgcactcagcgtccggccgcgggctcctcccgctggtgcgcacgctggtccgcagcggcgctgacagcagcctcaagaactgccacaacgacacgccgctcatggtggcgcgcagccgcagggtcatcgacatcctgagggggaaggccacccggcctgcttccacctcccagccagacccctcccctgaccggagcgccaacacctcccccgagagcagcagccgcctcagctccaatggtcttctctccgcatcaccatcctcctcaccctcccagtctccccccagggacccccctggattccccatggctcctcccaatttcttccttccttccccatctccacccgccttcctgccctttgctggggtcctccgaggccctggccggccggtgcccccctccccagctccaggaggcagctgagggggatgggggggcagatcttggactcatgaggaggggcccccctgccctgtggggtcaacccttctggaaactgtgaagatctcactctgccccccccccccatcttcgggaccaggatttgcacagaagcacatgcacctacccatacaccccctcttctgagcacagatgttcccccatctcgctccctcccaggactctgaccccagcattctcaggcaccagtccctgtccggaatgccacccacatcttccatttccatgtcccctcccagagctggtggacccagggaacagccactcccctccactctctaccagataactgaggaggggagaggtgggccgtaacgggcacggatcacgatgtaaattattaagcattttggttggatttcttttgtaataaactatttttgtaccata

SEQ ID NO: 292 - DNA, 3813 bp, Homo sapiens
aacgctggtcctcggccgggcgcgctgacgtcatcgtgcgtcagagtgagcccggatggggcggcgggcttcgggagcgcccgggctgatccgagccgagcgggccgtatctccttgtcggcgccgctgattcccggctctgcggaggcctctaggcagccgcgcagcttccgtgtttgctgcgcccgcactgcgatttacaaccctgaagaatctccctatccctattttgtccccctgcagtaataaatcccattatggagatctcgaaactttataaagggatatagtttgaattctatggagtgtaattttgtgtatgaattatatttttaaaacattgaagagttttcagaaagaaggctagtagagttgattactgatactttatgctaagcagtacttttttggtagtacaatattttgttaggcgtttctgataacactagaaaggacaagttttatcttgtgataaattgattaatgtttacaacatgactgataattatagctgaatagtccttaaatgatgaacaggttatttagtttttaaatgcagtgtaaaaagtgtgctgtggaaattttatggctaactaagtttatggagaaaataccttcagttgatcaagaataatagtggtatacaaagttaggaagaaagtcaacatgatgctgcaggaaatggaaacaaatacaaatgatatttaacaaagatagagtttacagtttttgaactttaagccaaattcatttgacatcaagcactatagcaggcacaggttcaacaaagcttgtgggtattgacttcccccaaaagttgtcagctgaagtaatttagcccacttaagtaaatactatgatgataagctgtgtgaacttagcttttaaatagtgtgaccatatgaaggttttaattacttttgtttattggaataaaatgagattttttgggttgtcatgttaaagtgcttatagggaaagaagcctgcatataattttttaccttgtggcataatcagtaattggtctgttattcaggcttcatagcttgtaaccaaatataaataaaaggcataatttaggtattctatagttgcttagaattttgttaatataaatctctgtgaaaaatcaaggagttttaatattttcagaagtgcatccacctttcagggctttaagttagtattactcaagattatgaacaaatagcacttaggttacctgaaagagttactacaaccccaaagagttgtgttctaagtagtatcttggtaattcagagagatactcatcctacctgaatataaactgagataaatccagtaaagaaagtgtagtaaattctacataagagtctatcattgatttctttttgtggtaaaaatcttagttcatgtgaagaaatttcatgtgaatgttttagctatcaaacagtactgtcacctactcatgcacaaaactgcctcccaaagacttttcccaggtccctcgtatcaaaacattaagagtataatggaagatagcacgatcttgtcagattggacaaacagcaacaaacaaaaaatgaagtatgacttttcctgtgaactctacagaatgtctacatattcaactttccccgccggggtgcctgtctcagaaaggagtcttgctcgtgctggtttttattatactggtgtgaatgacaaggtcaaatgcttctgttgtggcctgatgctggataactggaaactaggagacagtcctattcaaaagcataaacagctatatcctagctgtagctttattcagaatctggtttcagctagtctgggatccacctctaagaatacgtctccaatgagaaacagttttgcacattcattatctcccaccttggaacatagtagcttgttcagtggttcttactccagcctttctccaaaccctcttaattctagagcagttgaagacatctcttcatcgaggactaacccctacagttatgcaatgagtactgaagaagccagatttcttacctaccatatgtggccattaacttttttgtcaccatcagaattggcaagagctggtttttattatataggacctggagatagggtagcctgctttgcctgtggtgggaagctcagtaactgggaaccaaaggatgatgctatgtcagaacaccggaggcattttcccaactgtccatttttggaaaattctctagaaactctgaggtttagcatttcaaatctgagcatgcagacacatgcagctcgaatgagaacatttatgtactggccatctagtgttccagttcagcctgagcagcttgcaagtgctggtttttattatgtgggtcgcaatgatgatgtcaaatgcttttgttgtgatggtggcttgaggtgttgggaatctggagatgatccatgggtagaacatgccaagtggtttccaaggtgtgagttcttgatacgaatgaaaggccaagagtttgttgatgagattcaaggtagatatcctcatcttcttgaacagctgttgtcaacttcagataccactggagaagaaaatgctgacccaccaattattcattttggacctggagaaagttcttcagaagatgctgtcatgatgaatacacctgtggttaaatctgccttggaaatgggctttaatagagacctggtgaaacaaacagttcaaagtaaaatcctgacaactggagagaactataaaacagttaatgatattgtgtcagcacttcttaatgctgaagatgaaaaaagagaagaggagaaggaaaaacaagctgaagaaatggcatcagatgatttgtcattaattcggaagaacagaatggctctctttcaacaattgacatgtgtgcttcctatcctggataatcttttaaaggccaatgtaattaataaacaggaacatgatattattaaacaaaaaacacagatacctttacaagcgagagaactgattgataccattttggttaaaggaaatgctgcggccaacatcttcaaaaactgtctaaaagaaattgactctacattgtataagaacttatttgtggataagaatatgaagtatattccaacagaagatgtttcaggtctgtcactggaagaacaattgaggaggttgcaagaagaacgaacttgtaaagtgtgtatggacaaagaagtttctgttgtatttattccttgtggtcatctggtagtatgccaggaatgtgccccttctctaagaaaatgccctatttgcaggggtataatcaagggtactgttcgtacatttctctcttaaagaaaaatagtctatattttaacctgcataaaaaggtctttaaaatattgttgaacacttgaagccatctaaagtaaaaagggaattatgagtttttcaattagtaacattcatgttctagtctgctttggtactaataatcttgtttctgaaaagatggtatcatatatttaatcttaatctgtttatttacaagggaagatttatgtttggtgaactatattagtatgtatgtgtacctaagggagtagtgtcactgcttgttatgcatcatttcaggagttactggatttgttgttctttcagaaagctttgaatactaaattatagtgtagaaaagaactggaaaccaggaactctggagttcatcagagttatggtgccgaattgtctttggtgcttttcacttgtgttttaaaataaggatttttctcttatttctccccctagtttgtgagaaacatctcaataaagtgctttaaaaagaaaaaaaaaaaaaaaaaa

SEQ ID NO: 293 - DNA, 3150 bp, Homo sapiens
ccacaaagggcacttggccccagggctaggagagcgaggggagagcacagccacccgcctcggcggcccgggactcggctcgactcgccggagaatgcgcccgaggacgacggggcgccagagccgcggtgctttcaactggcgagcgcgaatgggggtgcactggagtaaggcagagtgatgcgggggggcaactcgcctggcaccgagatcgccgccgtgcccttccctggacccggcgtcgcccaggatggctgccccgagccatgggccgcggcggagctagcgcggagcgcccgaccctcgacccccgagtcccggagccggccccgcgcggggccacgcgtccctcgggcgctggttcctaaggaggacgacagcaccagcttctcctttctcccttcccttccctgccccgcactcctccccctgctcgctgttgttgtgtgtcagcacttggctggggacttcttgaacttgcagggagaataacttgcgcaccccactttgcgccggtgcctttgccccagcggagcctgcttcgccatctccgagccccaccgcccctccactcctcggccttgcccgacactgagacgctgttcccagcgtgaaaagagagactgcgcggccggcacccgggagaaggaggaggcaaagaaaaggaacggacattcggtccttgcgccaggtcctttgaccagagtttttccatgtggacgctctttcaatggacgtgtccccgcgtgcttcttagacggactgcggtctcctaaaggtcgaccatggtggccgggacccgctgtcttctagcgttgctgcttccccaggtcctcctgggcggcgcggctggcctcgttccggagctgggccgcaggaagttcgcggcggcgtcgtcgggccgcccctcatcccagccctctgacgaggtcctgagcgagttcgagttgcggctgctcagcatgttcggcctgaaacagagacccacccccagcagggacgccgtggtgcccccctacatgctagacctgtatcgcaggcactcaggtcagccgggctcacccgccccagaccaccggttggagagggcagccagccgagccaacactgtgcgcagcttccaccatgaagaatctttggaagaactaccagaaacgagtgggaaaacaacccggagattcttctttaatttaagttctatccccacggaggagtttatcacctcagcagagcttcaggttttccgagaacagatgcaagatgctttaggaaacaatagcagtttccatcaccgaattaatatttatgaaatcataaaacctgcaacagccaactcgaaattccccgtgaccagacttttggacaccaggttggtgaatcagaatgcaagcaggtgggaaagttttgatgtcacccccgctgtgatgcggtggactgcacagggacacgccaaccatggattcgtggtggaagtggcccacttggaggagaaacaaggtgtctccaagagacatgttaggataagcaggtctttgcaccaagatgaacacagctggtcacagataaggccattgctagtaacttttggccatgatggaaaagggcatcctctccacaaaagagaaaaacgtcaagccaaacacaaacagcggaaacgccttaagtccagctgtaagagacaccctttgtacgtggacttcagtgacgtggggtggaatgactggattgtggctcccccggggtatcacgccttttactgccacggagaatgcccttttcctctggctgatcatctgaactccactaatcatgccattgttcagacgttggtcaactctgttaactctaagattcctaaggcatgctgtgtcccgacagaactcagtgctatctcgatgctgtaccttgacgagaatgaaaaggttgtattaaagaactatcaggacatggttgtggagggttgtgggtgtcgctagtacagcaaaattaaatacataaatatatatatatatatatattttagaaaaaagaaaaaaacaaacaaacaaaaaaaccccaccccagttgacactttaatatttcccaatgaagactttatttatggaatggaatggaaaaaaaaacagctattttgaaaatatatttatatctacgaaaagaagttgggaaaacaaatattttaatcagagaattattccttaaagatttaaaatgtatttagttgtacattttatatgggttcaaccccagcacatgaagtataatggtcagatttattttgtatttatttactattataaccactttttaggaaaaaaatagctaatttgtatttatatgtaatcaaaagaagtatcgggtttgtacataattttccaaaaattgtagttgttttcagttgtgtgtatttaagatgaaaagtctacatggaaggttactctggcaaagtgcttagcacgtttgcttttttgcagtgctactgttgagttcacaagttcaagtccagaaaaaaaaagtggataatccactctgctgactttcaagattattatattattcaattctcaggaatgttgcagagtgattgtccaatccatgagaatttacatccttattaggtggaatatttggataagaaccagacattgctgatctattatagaaactctcctcctgccccttaatttacagaaagaataaagcaggatccatagaaataattaggaaaacgatgaacctgcaggaaagtgaatgatggtttgttgttcttctttcctaaattagtgatcccttcaaaggggctgatctggccaaagtattcaataaaacgtaagatttcttcattattgatattgtggtcatatatatttaaaattgatatctcgtggccctcatcaagggttggaaatttatttgtgttttacctttacctcatctgagagctctttattctccaaagaacccagttttctaactttttgcccaacacgcagcaaaattatgcacatcgtgttttctgcccaccctctgttctctgacctatcagcttgcttttctttccaaggttgtgtgtttgaacacatttctccaaatgttaaacctatttcagataataaatatcaaatctctggcatttcattctataaagtc

SEQ ID NO: 294 - DNA, 1303 bp, Homo sapiens
caagagcgcgggcggcgaggcaagatggcggcaaccaagaggaaacggcgtggaggctttgcagttcaggcgaagaagccaaaaagaaacgaaatagatgcggagccgccagctaagcggcacgccacagcagaggaggtggaggaagaagagagggaccggatcccaggccccgtttgcaagggaaagtggaaaaataaggaacggattctcatcttttcttccagaggaataaattttagaacaagacatttaatgcaggacttgagaatgttgatgcctcattctaaagcagatactaaaatggatcgtaaggataagctatttgtgattaacgaggtttgtgaaatgaagaactgtaataaatgcatctattttgaagctaagaaaaaacaggatctctatatgtggctttcaaattcacctcacggaccatctgctaaattccttgttcaaaatattcataccctcgctgaactgaagatgactggaaactgtttgaaaggttctcggccccttttgtcttttgaccctgcttttgatgaattaccacattatgctttgttaaaagaactcttaattcagatctttagtacaccacggtatcatcccaaaagccaaccatttgtggaccacgtgtttactttcaccattttggataataggatatggtttcggaactttcagatcatagaagaagatgctgctcttgtagaaataggacctcgttttgtcttaaatctcataaagattttccagggaagttttggaggaccaactttatatgaaaatcctcactaccagtcaccaaacatgcatcggcgtgtcataagatccatcacagctgcaaaatacagagagaaacagcaagtgaaagatgtgcaaaaactgagaaagaaagagccgaagactcttcttccacatgatcccactgcagatgtttttgtaacaccagctgaggagaaaccaatagaaatacagtgggtaaaaccagagccaaaagttgatttgaaagcaagaaagaaacggatttacaaaaggcaaagaaaaatgaaacagaggatggacagtgggaaaacaaaataagtcaatggaaacctgatttgtttttcagttactttatatttattttgtattcaatgtgtaaatacttttattatctaatactatcttacgtctaattagtgtagcatttacaagaaagaaaaattaagatcttaaaatcagtgattatctttttctaaataaaatatcaccagaattcatcagttaaaaaaaaaaaaaaaaaaaaaaaaaaaaaaaa

SEQ ID NO: 295 - DNA, 1518 bp, Homo sapiens
agcggcgcctcgcgcgtcaggcaatctggccaattgcgcatcttttccgcctaccgcacggccccgcccctgccacaggatcgatttacggccgcagagaaaaaccaagatttcactttcaagatggaaagtccgtcagactcagctgtggttttacctagcactcctcaggcctctgcgaatccatcatctccctatacaaatagttcccgaaaacaacctatgagtgcaacacttagagaaagattaaggaaaacaagattttcatttaattcctcttacaatgtggtgaaacgtcttaaagtagagagtgaagaaaatgatcagaccttttcagagaaaccagcatcttccacagaggaaaactgtttggaatttcaagaaagttttaaacatatagacagtgaatttgaagaaaatacaaatttgaaaaatactttgaagaatctcaatgtctgtgaatctcagtcacttgattctggatcatgcagtgctctccaaaatgagtttgtgagtgagaagcttcctaaacaaagattaaacgctgaaaaagccaaattggtgaagcaggttcaggagaaagaagaccttcttcggaggctaaaactagtcaaaatgtatagatcaaagaatgatctgtctcagttacagttgttaataaagaagtggagaagctgtagccagctcttgctttatgagttgcagtcagctgtgtctgaagagaacaagaaactaagccttactcaattgatagaccactatgggttagatgataaattactacactataacagaagtgaagaagaatttatagatgtttaattcctgatttttgctccagaatatctttgagaatgacaacttaattaaaagatacttaggcactttttttttttttttgagactgagtttcgctcttgtcatcctggctggagtgtgatggtgcgatcttgactcactgcaacctctgcctctcgggttccagcaattctcctgcctcagcctcccgagtagctgagattacaggcgcccgccaccatgcccggctaatttttgcatttttagtagagactgggtttcaccacgttggccaggctggtctcgaactcctgacctcaggtgatccaccgcctaggcctcccaaaaccattagggctcagaggaaggtatcccaatgaatatcaattaagggcactttaatatataaattataaactaagttctaaaaggaaaattagtattttggatagatttgtcaaaacgacatttaagtcatgtttaaaaagtcatttgggcagttctggaaactagttttaatacatttgttttttatgacaaaaagttttattttaaatgttaaaaattgtccaatctggtgaatgtctaaccctaaagtttaaaaatttctgcctcctaagtttatgtaccttgtttccatccatttaccacatatttccatctgatagtctagcaggtaattaaacttatatgtccaaaaccataaaaaaaaaaaaaaaa

SEQ ID NO: 296 - DNA, 4445 bp, Homo sapiens
gcggctgctggtcccgggcgcgcggagggcgcgagcggcgcgcgggggccgagggggcgcgaggcagcggcgcggggactccgggccccggcggcggcccatggggcgggaggcgtgaggccgctgcctgtccggggctcggggggtggggggagcggggcggggagatggataaactgaccatcatctcaggatgtctctttctggccgccgatatcttcgccatcgccagcatcgccaacccggactggatcaacaccggggagtctgcgggagcactcactgtgggcctcgtgcgacagtgtcaaacaatccatggacgagaccggacgtgcatccctccccggcttcccccggagtgggtcaccacactgttttttatcatcatgggaatcatttcattgactgtcacatgtggtttgctggtggcttcccactggcgaagagaagctacaaaatatgctcgatggatagcattcactggaatgatccttttctgtatggctgccctaatatttccaataggattttacatcaatgaagtcggaggtcaaccttataaattacccaacaacacagtagttgggtcatcatatgtactttttgtcttatcaattttctttacaatagtaggacttctatttgctggcaaagtttgtttaccaggctgatgaatgtctaaattgcttgactcttattattttttattttattttatttttttatttttggagggtggagaggacaaaggcgaggcatctgagcaggcctctcatgggaagatgctcagatgaaactgatgctgagaaggaaaaaaaaatgctttggtttgttctcactatgcactttggatttaaaaaaaaaaaaaaaaaggagagccttttccataaccaaatacagacaatattgactaaatctcctgagcatattcaggcagtcaggtctgcactgtgatagcaacctagagaaggagaatgctttataccgaaaagcatgtggccctttgtgactctgttattccgtttttaatgtctaatgattcattagaggaaaaaaaaaagtctaagtatttatgtgtcatggtggaccagagggatgcaagagaagttcatgtggggctggcctcacctcctaagaaattagtgttcacaacttccttgtaatagtatgagcctttggcaccagaatggattgccgttgcattactgcaccaagaagccaatagatcaaaacttgtttgctaaaatgtatgtaaaaattctgaaattccctctctctgtgtacaaaaaaaaaaaaaaatcaaacactaagacacatgttttgggtgggtgggtgggggaaatcttccttatatttatataaatatatataatatatatattttgctgatgcagtatacagtgtgtatatatgtgtgtgtgtgtgtgtgtgtatgtgtgtgtaaatttatatacacacacatgcaaacagttcctggaagagaattctgaatgctttgctagcaaaacactgtggtgtgcaaacctagaacccaatagaaaaaaaagccatttatctgaaggctgcatagtggagagagtcttcagtttacctcattctttgtagcagcccttgattttaacaggtttttgtaataggtacagataatcccatacctttctaggtgcgattttaagttaagctaaaaattatttgtagggttaatttatttgtatatgatagtagaaggtaagatcatgtcaaaccttataatttggggaatctgacactatttaaattattggcaactgttgtctgttgtacagagattctttttctactggctcagtctgttacattaataatgcattttatatgttcaggcacactttacataaatacaaagttcgctagtaaatatctggctattttggctatttacaacactaatttcattatttttatctgtaagcattattaatacatctttaccaaaacctgagcaatacaatattttctttatatgttatatgcctttgtttgctaaaagctaatatttttgcatttactttaaagggctgtactaaacccacagctttaagttcttccctaaaagaagcattgcagctaacccttgaactcacagttttaaaatacagtatttctcttctccacatctccatgccttcgcatcaatgcttgtttttcctggtgaacactatagataatctcctgtttgaaatgtgggacagggtgtttcatggcagtggagctaagtttctcctctttatagtgaactggtgacccaaatgtccctgtcatttatagtgaactgatgacccaaatgactccctgtcagtagagtcccatgtggcccatgcttcacacaagcagaaatgaacgcactgtttttaaggctagattatcagttctagaatgattacttcaaagatgggagctacctcctcagatattcacactatgaaatggaggtgcttgatgtgtttcacactggcttgtttgacagtcttctatcttactgttaattcagcagtattttattgtgaaagaaaaccccagtgtttgagctcactcaggaattggggagagagatggaccaccactgtggtgcatttcttaagtgttctgggagaatgtcatacttttccttcccagagtaaaagaaacctttgggagatcctgagggagactgtttctccccaagtatgatgatgtctagtcaagtctaagaataccactggacatgttctatggacatttgggattgcagttgctattctgatttgattggtcctcagtcaaatggatcactttgaaggaaagctttggttgtcaccgttatataccactgagataaagtgttagcaaagtatggttcaaattaacttatgacatgaccaagagcttttctcttccaaaagatgaattgtattgtaaatagtttctcaaaatatttttaactggatcatgagcatggggagagaaagtttctcagctgctaagaatttccccactgtttacttctttcacttatggtggtattgcatttaagattacaaaatttaaggttttatttgtatctattacccaaaccattaaattgtctttaatttcattgttgtcttggaggtccagtgcatacagggctgatgggggaaaactccctctagccagtcagcactctaacccaggattaaaccatcccatcaagtagtatgtgaagtcaagtcttcgtactcttgcagaccagacattgaaatggattcattcatatagatttctataaatcctataagtgaaaagatagacaactgtccgcagttgcttttaaaaaaggtcactataataagtactatatagtacagtattaatttatagcaggaaatcgtatcttgtaaactgtatataaaacactgttttatggtgcaatcatttgtcaaacttttgtctgtttcattgtttttagagtgtgtgcattcttctcatacctaagaatatcactgtaaaatctgctgaaaactatttttaggttttatttgcacaagactgaattagtttgacatttttggaagctcctattgaacatacccaaacatctgtaaacatgaaaaatcttcaatttattaaaagcaaacatttcagtatgattctttccaaaggtaatccatgttctatgttgttaatgtgtgtatgtaatttttctgactcttccacctcttataaacctattttctgtttcatttgttttgtttttgaaggatggctcttttttctttttaatgttctagatgaccaaaacactattggtttttacccttttgcctaaagctttgatatccccacttgatgttctgtgaattcactgtttaatctattaagtgaaataataaatagtcctggtgacaaacaatctgttgatttagaggaaaggccctgaaaaatacagtattggaaactaactttgcatatgctgttagctattattttgcatcatgggcttcatgggaagaacatgttgcatttattttgtctttattaaaagactactagccacaagttactctgattatagtaactgttttatcaacccacttcatctttaaaaaattaaatttacattcacaattcaaaacagtaagctgtctttcagaaaatttttgaaggataaaaacatgaaggaaaaaagtggcccgtgtaggtaggattccctacacaggacttttagttgtatcacctcaagagattttgaagtttgtgatcaaggtctgtatattatcccaaactttattaagaattgttttctaattggttataacatttttcaattaatagtttcaaaacaaattgttaatacaactgtataaaatgaacataattttcctcacttgtatttttgttattgagcaagtttatcaaaataaattgtctactaaagaaactaaaaa

SEQ ID NO: 297 - DNA, 6349 bp, Homo sapiens
gctcgcgcccctgttccgcaggtgtgcggggcttgcgcccagcccgggccgcggccgccgcgcgtttcctccccgcttgcccgcccagaggcccccggccacgctcctcgccgggctccgaccccgccgcgccccctccacgcccccagcgcgctgtggccgcagccagcgcgtgtcctgagtccgccgttccggcccggggctgccggggaagttggggcgaggcgggccggggatgcgccatggccatggcccggctgggctcgtggctcggggaggcgcagtggctcgcgctggtgtcgctcttcgtcgcggccctggccacggtaggcctgtacctggcgcagtgggcgctggccagggcgcgaccccagccccagcggcgggcggtggagcctggagaggggccgcgcccggggtccgacgcgctgctctcctggatcctgacgctgggcagctggaggagccagtggcaggcggcctgggtgaccgccctgaacgaggaggccgagaggaaagggggcccacctttcctgtcctttgaggaggacccgcggcagcaggcactggagctggtggtgcaggaggtctccagcgtgctcaggtcggcggaggagaaggtggtggtctgtcacgtggtgggccaggctattcagttcttggtcagcgagacgcctgccttgggtgctggatgccggctgtacgacatgcggctctcccctttccatttacagctggagttccacatgaaggagaagagagaggacctccagattagctggtctttcatcagtgtgccggaaatggccgttaatatccagcccaaagcactgggggaggaccaggtggctgagacaagtgcgatgtctgacgttctcaaggacatcttgaagcatttggctggttctgcctctccatcagtggttctgattaccaagcccacgactgtaaaggaagctcagaacttacagtgtgctgcatctactgctcaggaatcctgtcctcctaaacctccaagggctcacgagctgaagctactggtgaggaacatccacgtcttgctgctcagcgagcccggtgcctcaggccacattaatgcagtgtgcgtcgtgcagctgaacgatcctgttcagaggttctccagcaccctgacgaaaaacactccggacctcatgtgggaagaggaattcaccttcgagttgaatgccaagtcgaaggagttacacctgcagatttcagaggctgggcgatcctcagaaggtctgctggcgacggcgacagttcctctggacttatttaagaagcagccttctgggccacagagcttcacgctgaccagcgggtctgcctgcggcagctcggtgctgggctcggtcacggcagagttctcttacatggaacctggtgaattgaaatcctggcccatccctccccctgttcctgctgcaaaaatagaaaaggaccgcacggtgatgccctgtgggactgtggtcactactgtcactgctgtgaagaccaagcctcgcgtcgacgtggggagggcgtccccgctgagctctgattctccggtgaagactcccatcaaggtgaaggtgatcgagaaggacatctctgtccaggccatcgcctgccgcagcgcccccgtcagcaaaacactctcttcttcagacacagaattgttggtgttgaatggttcggatccagtggctgaagtggccattcgacagctcagtgaatcttcaaagctgaaactcaagtcgccacggaagaaaagcactattatcatatcagggatctccaagacctcactatctcaggaccacgacgctgccctgatgcagggctacacggcctctgtggacagcacccaccaggaggacgccccatcccatccggagagggcggcagcctctgccccgccagaggaagccgagtcagcccaggcatcccttgcccccaagccccaggaggacgagctagactcctgggacttggagaaggagccacaggccgcggcatggagcagccaggtcctgctggaccccgacggtgatgagctgtcagagagctccatgagtgtcttggagccgggcactgccaaaaagcataaaggaggaattctaaggaaaggtgcaaagctgttcttccgccggcggcatcaacagaaagacccaggcatgagtcagtcacacaatgaccttgtgttcctggagcagccagagggttcccggaggaaaggcatcaccctcaccaggatcctgaacaagaagctgctctccaggcacagaaacaagaacaccatgaacggtgcccccgtggagccctgcacgtagggcctgaggtcatcacctccaagccagaagacgtgcacccatgttaactaccctcaccaggacgcagccagtgtgtccgccggatgtccagatgccccgcttgtcttgctgggtttcttccaaccatctcgtcatttaaagggaaaacaaaatctgagtctccagccaggaggcttctcccagagaggacaaaaaagcccaacttgccaccagatgctaaatgagacttgacagctgcagagcttgggctgtgctcatagctaagggttagggttcaatattagaaggagattaacattataagtgaaataatatgctctaatagattgtggagggcaggtttgagggacttagtttacctattctacactaacaagtgttgttttgggtccatgcctggaccatgtcacaaaaaggaggtgcccccctgtgctgtcactgtgaatggaaaggatgggtcacctctcttcatctgctgcttggaataaaaaatgcagctggccctgagtacagggaagtggaacataggcaggattttggattaatagagaaattttgataagaatggagacgctacgacagatgtaggaagtcatctacctttgatattagccatagaacttgaacactaactatatcctatgcatagtatgcagaacacttttctaagtttactttgagcctacttgcaagtggaagatatatatattctcacatggtttttacatttttctctatcgtgttaaaagctctaataatgctagtggagcagttgacatccagggttttttttcctgcctgtcatacttgctaaacaagagcacagcgggcctgtcagatgaagtcaggagccatacgtgaccgctcgtagaacacagtaaccaaacacatacatggattttgccaagtgctgccagtagccaaaacaaagtctttttagggcaatagaggaaattattttgtgtctcaggtgtcagtcttaggaatggaagtttaataacaaatgggccaaactcgcaggacattccttctatgagcgcttcagaattttgctgtgaacagtcctcttggacacaggttggggtgcccttgtttgggtttgttttggtggaaaacatcacaaacctggcacaccatttgaatatccctaatatcattccagtcgctttcctcatcagttgcctttctatttcagttcattcacagatctcacttctgaatgtgccacttccagtagacatgctggtcaaagagcagtcatcattggggtgaagtgttcttgacagtttaatatgattcacttttctccaaagacatgtaaaaggctgttacgaaagcttggcttctgtcatggagacggaaatgggcaagcttccttccgtagcctcttgttaatccttaaacattaaatatttcgggggtaatagagccactggtgagtaaaaacctatataaaaaccaaaattataggattttttcttttttagtaaaaaccggtatcaaaaccaaaattataggatttttttcttttttagtaaaaacctatataaaaaccaaaattataggattttttcttttttagtaaaaacctatatgaaaaccaaaattataggatttttttcttttttagtaaaaacctgtataaaaaccaaaattataggatttttttttcttcttttttagagagagagattagaaaacgacattaggaatttcactttaaaatgcgcattacaaacttcttaggtgttccaggaattatcaagtgactttaaaatgacttttccaacctgctttgtttttaaaaattatattccagttttaatcattgtaaaaaaagcacctggagtttcaaaacatgtgaatactaccaagtttctgtccccaaagtcaggcatcactgttagtcttttgggacagatgggacagatgttcactttaatgttttacttgaagttttactgctctttgccatgtggtaaaaagaggctgagacatatttaagaattccaagaggatattatgtgtcagaatttcagacactgatgagaagtttttaattgttcttttttatttgattttggaattcaggtgcactctattcaagtgcaaggatatcagaagtttttttttatttaaaaaatttttttttcgagatggagtttcactctgttgcccaggctggagtgcaatggcagcttactgcaacctccacctcctggttcaagcgattctcctgcctcagcctcccaagtagctgggattacaggcacgcgccaccacacctggctaattctatttagtagaaatggagtctcaccatgttggtcaggctggtctcgaactcctgacctcaggtgatccacccaccttggcctcccagcgtgctgggattataggcatgagccaccaggccggccccaggattttatattaagccttcttgctctcaaaaaaaaaaaaaggttttaactattccatttccagatgaatcccatgagcgctgcttactgttgaataccaaggtctagggctctgcttcctgtagacacgcacacgttgtctccatccaatggccttttctgaagttacagaaaacaccaacatgggagggagtttatgaagcaaaggcaaaggcaacacgtcggctagcttcagggtagcaccgtgagaaatgggctgtattgatactgtgaatgtttgttttccaagctgttttatacaggtttgttttttcatggtgtagggtatttatgacaaagtaaatgttgtgaaggttaaagataaattaagattatccaccaaatgctaaaaatactgatgtgtaaatcacctttatcgcctcacctcttctacaagcttttgtggcttgagggcttttgtttttggcttttgtctggatgaaagttttgcccagttgtgttttaaaaacaattcctcatgaacactaagattaattgtgtctgtatctctggaactgggtgctcatgttggttttaatgagcttgcaacccttccccgtttgctttgtttaaggaggtgcctctgttctttgtggaggagtgaaatggagctttaagtgtgtgtgtgtgttatgtgtgtttgcacacacgcgtgtgttattgtagcaataacaaaaagtagccatctccttgttccagctgaaaacctgctgtgagagttttgacagagcactttattttcgtcaagtttcaagtctgagttcaaaaccagccctgatcccttatgaccaactgctactcgaccagtcgccactcagtggccacctggtgcccgtttagatttttgcttgggttttactggccacctctatagacgagagttgcaaagttgctttgagcagagagggaaagattaatttacactgctggccaccgaaggcaggtgtttcctgggtagtaatctcacggctcttgatctggaaacttcagagtacaaattggtggatggtggaaggcaggacacgtatctctgtctgacggaaaacagacctcggggctggcgtaaaccctgctgccaggccctctccccactgccccaaaccggcctagacacgaagaccaaagcagcctgcacagggcaaggcccccgcggaatcctgcagagcaaactcaggttaacttgggtccatgaccgtttgcattcgaaacacaatacactgcctcgttctctcagttagcagctgggcagcagcgcaccattcatcatttaggcttgtggtttgttgtttactctaccaatgttatgtcgaaactgcattgtaaaaagagaagaaagtggcaggttttccaggtccacggaaaggtttggcctgacgctggagtgcggtgatgaacttacgtgacaatgattgtattcctcagtagcactttaaacgccgaagacagccctgcagcaagcctgcacacgggcttgggtgggttcctttggagaagatgtggctggaacacaaacaatctttgaaagaaataaatgtgcacacagaacactacaaa

SEQ ID NO: 298 - DNA, 3897 bp, Homo sapiens
atgacttgctaccgaggcttcttgctgggcagctgttgtcgcgtggcgggcggccgggcggcggcgctgcggggaccgggtgcgggaggccccgccgcgcggccccggctgggcggtgacggtggcggccggcggcacctggggcaggggcagccgcgcgagctggcgggctgtggcagccgcgcggacggcggcttccgcccctcccgggtggtggtggtggccaaaaccacccggtacgagttcgagcagcagcggtaccgttacgcggagctctcggaggaggacctgaagcagctgcttgcattgaaaggctctagttacagtggacttcttgaacgacatcatattcacaccaaaaatgtagaacatattatagatagtttacggaatgagggaattgaggttcgtctagtaaagaggagagaatatgatgaagagactgttcgatgggcagatgctgtcatagctgcaggaggtgatggcacaatgctgctggcagcgagtaaagtcttggacagacttaaaccagttataggggtaaacactgatccagaacggtctgagggtcatttatgcctgcccgttcgatatacacattcctttccagaagccttacagaagttctatcgtggtgagttcaggtggttgtggaggcagagaatcaggttataccttgaagggactggcataaaccctgtacctgtggaccttcacgagcagcagctaagcttgaatcagcacaatagagcccttaacattgaaagagctcatgatgaaaggtctgaggcttcaggaccccaacttctgccagtgagagcactaaatgaagtcttcattggggagagtctgtcatccagggcttcctactatgagatttcagttgatgatggtccatgggaaaaacagaagagttcagggctcaatttgtgtactggaacaggatcaaaggcctggtcattcaatattaacagggttgcaactcaggctgtagaagatgttttaaatattgcaaaacgacaaggaaatttgagtcttccattgaacagagaattggtagagaaagtaacaaatgaatataatgaatcactgctctacagtccggaagaaccaaaaatacttttcagtattcgagaaccaatagcaaatagagttttctcaagcagtcgtcagcgttgtttctcctcaaaggtttgtgttcgttctcgttgttgggatgcctgtatggttgtggatggaggaacttcttttgagtttaatgatggtgcaattgcttcgatgatgatcaataaagaagatgagcttcgaactgtgcttcttgaacagtgaaggatttcctcatgacaaattttgattactggcgagaatatttttacttcagaaacagactaccagtcgtaaagtgacattttttggttattgttgagactgcttgcccgtgggctcagaagtgagatttgcattattcttctgttggattctgatagaaaaaaagacattcactgtataagaaaatggatggactgaaccaattagaattgataccagtgaaatttttatattgcttacaattggtaaccaagagtgctgatacctttttaaatttagaggggcaggcttaaataaaggactaaatatttaggatttgaaacttaactgtataagtgtgttttccttccctttcctcctaattgtgggattgtcagaactgaacacatatcatttgattagtgcatattttttatagtacctgaaaaccaagattttgaaaaaattttcaagacagagaattttgataaatcctgacattgacctaattgacataggtaaatatgtttgtatatgtgctaataattttctaatttcggaacacgatgatgttatgactattgatttaaaaatttcaaataataatttttgaaattatagatgaatgctttcatttgagtttcattctgtaattcagcagttctgggtgaaatacagatagcaaaacaaatcatgatgctgttacaaatgtattagttatccaataagtgttttaagtcaatttttttaaaatgatatgagtcttacaggtttcttccatctttaaaatgctcaaacatggattcagggactaaaaggatgaactgattagacattttctattaggagtttggtaaaatattgtaaaaatatcttcacctgtgttaggagtattatcagaaagaatggattctttaataaatatgtaaaacacagtagttttggaattgccttccttagtattgtggttttcacctagcttatattccaagatttacagaatagcttttaggataagatgttaggactttttttttttccccatgagaattcctttatttttggaggaaattattatctaattattgatctacttataagtaatcctagaatttttgccaaaagatcctgtcgttgcataatcaaacagttggtattctcgtgccgttgttcaaagtcatgtgtttctttcatttggtgctgaaaatttctgttcaatcattgacaaatatttattgaacacccactctgtgccatgtaaaactatgtcaggtgctggatatgttgatgaatgaaacagactctatccttatacaatttgagtcttgtgggctcagaagtaaattctgtgaaagctggacggatagtcgaattgagtgctcttagttttgccaatatttaacatgttgttcttatcaattttttaaaataaatgttaatgtacaaagttaatctaggttttgatgtatatccagagaatcaatttttcttaaagtatctgcgtagacattcatagcaaagaatttatgacatatcagatagaaatacattaaaatgtagtgttttcccagagattgatctggctttttttttttgatatacataagataccactttataaagaagctccatactatagaacctcccctaacaggcttaaaataccttctttttttttttttttttttttgagaacggagtcttgctttgtcacccaggctggactgcagtggcatgatctcggctctgcaacctccatctcccaggttcaagcgattctcctgcctcagcctcccaagtagctgggattacaggcaggcaccactatgcctggctaattttttgtatttttagtagatatggggattcaccatgttggtcaggctggtctcgaactcctgaccttgtgatctgcctgcctcggcctcccagtattgggattacaggcatgagccaccatgcccggccttaaaatgccttcttaaaggaaaaatgccaactccatccttaatctcaaggaaatctgattgtccaaatagatctgttaatatgtaacatattaataggtaacttgctgtgtaaaattataagccatattttaaaaggttttaaaaatacttattgtgctccatttgtgatataatttctaacatttctgctctgtgatgggggtttatttgtaagaataagaggcaaaggaatgttagcatagcaaaaatgtgtttgaatgagttaaccttttaatcgcaaccctatgtgaataaaattactccactgttacctcttctttttaacatttcttatttccctctcaaggggtcattatttgaaaactagttttcacaaaatgttatgtttcagaagtgtttccccactgctgtgtattattattctgtgccctgttgacttcattcactgttaacatttgacatagaatgattagttattaaatcagggtgaagtgcttacctggtcagtgtaggctcttcagataattttgacttaatatttttgatactccttgtgcatttacattcatggcccctgtacattaaatcatattacatgttttactaaaaaaaaaaaaaa

SEQ ID NO: 299 - DNA, 1338 bp, Homo sapiens
ggcacgagacggaatttactgccggaagttcggcggccttcgccaaagagtgtgggctcggctagcaagctagaggggctcgtttccgccccgctaccgggcgggggcggccatcttagatgcgtgcaattaagggctttggcgggattggctccgcgtttgggctggtccgctgctccccacctaccagggtcggatccggagcccttccccgcggggcggggacctccaaacaaccgactcctttccaggtgaagggtgacttggctgaagaaacacttaaattctggaaatagcgactcagtatcatggccagcagccttaatgaagatccagaaggaagcagaatcacttatgtgaaaggagacctttttgcatgcccgaaaacagactctttagcccactgtatcagtgaggattgtcgcatgggcgctgggatagctgtcctctttaagaagaaatttggaggggtgcaagaacttttaaatcaacaaaagaaatctggagaagtggctgttctgaagagagatgggcgatatatatattacttgattacaaagaaaagggcttcgcacaagccaacttatgaaaacttacagaagagtttagaggcaatgaagtctcattgtctgaagaatggagtcactgacctctccatgcccaggattggatgtggtcttgatcgtctgcaatgggaaaatgtatctgcgatgatcgaggaggtatttgaggcaacagacatcaaaattactgtgtacacactctgaaccagtgaacattttggatgtttccgtgttctcctgtgtcatctctactgggccataggaccgggcaaacctaccttaaaataggcagaggaaagtttcatgagaagtagtgtgtttaacaagacagactttggttgctgtattcaagtatttggattatgactgtggaggagggcttgcttaagatatgtggttgtgtttttttgtggaaaagtaaggagttaggtggcttgataataggcagggaaaccagattgtcgggactatgacctttttctccagtatgctacctgatttgtttggctggccactaggtggcagcattggttctacttctctgctttttaagagaaatttcaggaaggatgatcattccagttagtttggcattttttgtcgtttgtgcacataacttggtgttatccttatgtcatcagattcctcctaggggagagtttttgttttaattacaaaattaaattctacattgttaccaagaaatttgtggtgataaaaatggaaaaataaaaatttggggagttaaaaaaaaaaaaaaaaaaaaaaaaaaaaa

SEQ ID NO: 300 - DNA, 2144 bp, Homo sapiens
gtcattcacgcgcgccgcagcggggcaccggaagttatggaggtattaataggggaccctattaccacatgtctttctccctcagtgtatgatataatttgtaatcttgggtttcaactcagagaaaattgtgatatcaatagcattgtaactcagaatggtgaagtatgctggaaaacaatcacagactgtgtgagctacacagagtcagagcagggtctggattactggggaagcgtgaggctgctgggccctgtgtgtgaggctgtccattcacatttcttatctctgaccaaggggcaatttgaaattcgatatgcaccgtggttccagtggacaagttttccagagttatttcctgaaatatttgatgccttggaaagtctacaatctcctgctatttctcttagcttaatgaaactgacatcgtgtctagaacgagccttgggtgatgtatttttactgattgggaaggaatgcccctttcttttaagagatctgctttcatctgaggagcttgctcaagtcttcagtcagtctgtgatgaatgtgctaaaagtcttcgttggctctccgtgtggtctcaacctgcgtaacgtcttatggcatgggtttgcgtcacctgaagaaattcctccaaaatactgttcaatgatgatactgttgacggcaggattgggtcagttactgaagagttaccttcaaaacactaaacttacattggcacatcgctctttcatatctcttacaaacctcgaggatttgattgtttttcctgatgttacttatgaggtgctttcagtattagaagaagtgatgatgaaatctgcttttatattaaaaatcatgttaccatattgggaagttgcactggtcaagttcaagtcacacaggtttgctgactgcgccatattgttgctgacacaactggagactggacttaggaatgtttttgccacacttaacagatgtccaaaaagactcctgactgctgagtcaacagctctttataccacctttgatcaaatattggcaaaacacttgaatgatggtaaaatcaatcagcttcctcttttccttggagagcctgctatggaatttctctgggatttcctgaaccatcaggagggtccccgcataagagatcatttaagccacggggagatcaacttacatgaattttcaaaagaaacaactaatcagttgcttgcattttctcttgtactgctactcagattcgttgatgactgtctgctatcagtttttaaggaaaaatcagccgtagaattgttgattagtcttgcagaaggctatagttctcgctgtcatccggtttttcagcttaaaaaacaggtgctgagctgtgaggagagcatcagggtttgggctctgctgcctttccccgaagaactcactcggcaagccgtcagattagaagataattctgaaacaaatgcctgccactctttgattacaaaaatgacggatgagctgtatcaccatatgcctgagaatcgttgtgtgttaaaggacttggatcgtcttcctactgagacgtggccccagcttctccgtgagctctgcagcacacctgttcccaccctgttctgccccaggattgtgctggaagtgctggttgtgctccgaagcatcagcgaacagtgccgccgtgtgtccagccaggtcaccgttgcctcagagctgagacacaggcagtgggtggaaaggacgctgcggtctcgccagcggcagaactacctgcgtatgtggagtagtatcagactactgtcccctgtgctcagcctgatactgttactcattgcgctggagttggtcaacattcatgctgtttgtgggaagaatgcgcatgagtatcagcagtacctaaagtttgtaaagtcgatcttgcagtacacggagaacctggtggcttacaccagttacgaaaagaacaagtggaatgaaactatcaatcttacacatacagctttgttgaaaatgtggacttttagtgagaagaaacaaatgttaatacatttagccaagaaatccacaagtaaagtactcttatgaaaacttgtaagtcaggatgcttttaattttaacagattttaacagcgtgtaaattaaaaacccaaagacag

SEQ ID NO: 301 - DNA, 5241 bp, Homo sapiens
gatgagtgatttcctgagcatgcctagggaatgacaggcatctccacaggcaggctgcatccaccttggctggggtgtcgtcattggctgcctattagaaaaacgacaggacaatgcataccaccgcctcccgactgtaaacataggggatatgtgttcacttagcatggacttctgggaggggccaaggaagggcggtctggagttttattgaatagagcagtgtgtattcggctgcctgcctgcccgcctgcttgctctctggctgtgctcctgcttaaagaaatcagtccttcctttccgacttagtcctcgggaagaagtttcagactacaaggtatcattggaacatttcaagatcatcaaatcaaattccacagggattggtgaccaaccagaaggctcagacatctgattgctgacctgtccagacatcatctggtctccctgaacctgaaatcacaccatggatgattttgagcgtcgcagagaacttagaaggcaaaagagggaggagatgcgactcgaagcagaaagaatcgcctaccagaggaatgacgatgatgaagaggaggcagcccgggaacggcgccgccgagcccgacaggaacggctgcggcagaagcaggaggaagaatccttgggacaggtgaccgaccaggtggaggtgaatgcccagaacagtgtgcctgacgaggaggccaagacaaccaccacaaacactcaagtggaaggggatgatgaggccgcattcctggagcgcctggctcggcgtgaggaaagacgccaaaaacgccttcaggaggctctggagcggcagaaggagttcgacccaacaataacagatgcaagtctgtcgctcccaagcagaagaatgcaaaatgacacagcagaaaatgaaactaccgagaaggaagaaaaaagtgaaagtcgccaagaaagatacgagatagaggaaacagaaacagtcaccaagtcctaccagaagaatgattggagggatgctgaagaaaacaagaaagaagacaaggaaaaggaggaggaggaagaggagaagccaaagcgagggagcattggagaaaatcaggtagaggtgatggtggaagagaaaacaactgaaagccaggaggaaacagtggtaatgtcattaaaaaatgggcagatcagttcagaagagcctaaacaagaggaggagagggaacaaggttcagatgagatttcccatcatgaaaagatggaagaggaagacaaggaaagagctgaggcagagagggcaaggttggaagcagaagaaagagaaagaattaaagccgagcaagacaaaaagatagcagatgaacgagcaagaattgaagcagaagaaaaagcagctgcccaagaaagagaaaggagagaggcagaagagagggaaaggatgagggaggaagagaaaagggcagcagaggagaggcagaggataaaggaggaagagaaaagggcagcagaggagaggcagaggataaaggaggaagagaaaagggcagcagaggagaggcagaggataaaagaggaagagaaaagggcagcagaggagaggcaaagggccagggcagaggaggaagagaaggctaaggtagaagagcagaaacgtaacaagcagctagaagagaaaaaacatgccatgcaagagacaaagataaaaggggaaaaggtagaacagaaaatagaagggaaatgggtaaatgaaaagaaagcacaagaagataaacttcagacagctgtcctaaagaaacagggagaagagaagggaactaaagtgcaagctaaaagagaaaagctccaagaagacaagcctaccttcaaaaaagaagagatcaaagatgaaaagattaaaaaggacaaagaacccaaagaagaagttaagagcttcatggatcgaaagaagggatttacagaagttaagtcgcagaatggagaattcatgacccacaaacttaaacatactgagaatactttcagccgccctggagggagggccagcgtggacaccaaggaggctgagggcgccccccaggtggaagccggcaaaaggctggaggagcttcgtcgtcgtcgcggggagaccgagagcgaagagttcgagaagctcaaacagaagcagcaggaggcggctttggagctggaggaactcaagaaaaagagggaggagagaaggaaggtcctggaggaggaagagcagaggaggaagcaggaggaagccgatcgaaaactcagagaggaggaagagaagaggaggctaaaggaagagattgaaaggcgaagagcagaagctgctgagaaacgccagaagatgccagaagatggcttgtcagatgacaagaaaccattcaagtgtttcactcctaaaggttcatctctcaagatagaagagcgagcagaatttttgaataagtctgtgcagaaaagcagtggtgtcaaatcgacccatcaagcagcaatagtctccaagattgacagcagactggagcagtataccagtgcaattgagggaacaaaaagcgcaaaacctacaaagccggcagcctcggatcttcctgttcctgctgaaggtgtacgcaacatcaagagtatgtgggagaaagggaatgtgttttcatcccccactgcagcaggcacaccaaataaggaaactgctggcttgaaggtaggggtttctagccgcatcaatgaatggctaactaaaaccccagatggaaacaagtcacctgctcccaaaccttctgacttgagaccaggagacgtatccagcaagcggaacctctgggaaaagcaatctgtggataaggtcacttcccccactaaggtttgagacagttccagaaagaacccaagctcaagacgcaggacgagctcagttgtagagggctaattcgctctgttttgtatttatgttgatttactaaattgggttcattatcttttatttttcaatatcccagtaaacccatgtatattatcactatatttaataatcacagtctagagatgttcatggtaaaagtactgcctttgcacaggagcctgtttctaaagaaacccatgctgtgaaatagagacttttctactgatcatcataactctgtatctgagcagtgataccaaccacatctgaagtcaacagaagatccaagtttaaaattgcctgcggaatgtgtgcagtatctagaaaaatgaaccgtagtttttgtttttttaaatacagaagtcatgttgtttctgcactttataataaagcatggaagaaattatcttagtaggcaattgtaacactttttgaaagtaacccatttcagatttgaaatactgcaataatggttgtctttaaaaaaaaaaaagaaatgtactgttaaggtattactttttttcatgctgatgattcatatctaaattacattattatgttagctgacagtggtactgattttttaggttggttgttttgtggatttctttagtagtgatagtagcctgaaccacattttagataactcaattatgtatgtatgtgcatacacatatacaaacacactaatggtagaatgcttttttatgtgctagactattatatttagtagtatgtcattgtaactagccaatatcacagcttttgaaaaattaaaaaatcacactatattaatattttatatttgccaacagaaacatggcagataggtatcaatatgttttcaatgcctgatgacctataagaagaaagtattgaaaagaagagagattagaactgttagaaggagttgaaattttctaaaagacatagtatttagtttataattaaatgcattcttgaagtccagtgtgaattttattaatgctatcatctcgaccaagctcaaagcctacttattagaaacaatgaagttcacaataggtcataaggtctcttccttttctaaaattgaaagacaagaaatttagtgccaatattgtacagacagaaattccatgtatgagtctcaacaaagactacctttggctaaatgtctagaagcagagaagtaaagtgagcaaaatccagtgttgaggagtcatgacagtactttgatctttatatactctgaagcatttcttcaaacttttctacttttatttgtcattgatacctgtagtaagttgacaatgtggtgaaatttcaaaattatatgtaacttctactagttttactttctcccccaagtcttttttaactcatgatttttacacacacaatccagaacttattatatagcctctaagtctttattcttcacagtagataatgaaagagtcctccagtgtcttggcaaaatgttctagtatagctggatacatacagtggagttctataaactcatacctcagtggacttaaccaaaattgtgttagtctcaattcctaccacactgagggagcctcccaaataactattttcttatctgcagtattcctccagaagagctaaccagggcagggctggcatgagaagtgacatctgcgttacaaagtctatcttcctcataagtctgtaaagagcaattgaatcttctagctttagcaaacctaagccaaaggaaggaaagccatgaagaatgcagaagtcaaaccctcatgacaaagtaggcacaagtctacaataagctaaatcagaatttacaaatacaagtgtcccaggtagcattgactcccgtcattggagtgaaatggatcaaagtttgaattaaggcctatggtaaggtaacattgctttgttgtacttttgaacaagagctcctcctgatcactattacatatttttctagaaaatctaaagttcagaagagaatgtatcactgctgacttttattccaatatttggatggagtaagttttagggtagaattttgttcagtttggatttaatcttttgaaaagtaaattccttgtttactggtttgactataattctctgttatctttacgaggtaaaactgcaagctgactagcatgttctgtgaatctgccattcctaaaaattttataaacacttgatacttttcactgataatggatcgctccaataaacatatattgtgaaaatgcatccacaataaatggaattccttcctgcaaaatgtctttttctcacttatttttatgtacaatattgatagtgagaggtatgtctattataataaagattatggcacagtaaaacctgtaaaaaaaaaa

SEQ ID NO: 302 - DNA, 5304 bp, Homo sapiens
gcagccggagtgacgcgtggccgccggcacccggagctcctgggcacacggcattggcaggggccgcttcggcagagtgatgactgatgatgagtccgagagcgtcctctccgactcccatgaagggtcggagctggagctgcctgttatccagctgtgcgggctggtggaggagctcagctatgtaaactctgctctcaaaactgagactgagatgtttgagaaatattacgctaaactggagcccagggatcagcgacctccacgattatcagaaattaaaatatcagcagcagattatgcacagtttcgaggcaggcgtagatccaaatcccggacaggtatggaccgtggggtaggcctgactgccgaccaaaaacttgagctggtacaaaaagaggttgcggacatgaaggatgacttacgacacacaagggcaaatgcggaacgcgacctgcagcatcacgaggcgatcattgaggaggctgaaattcgatggagtgaagtttcgagagaagtgcatgagtttgaaaaagatattctaaaagccatatccaagaagaaagggagtattttggccactcagaaagtgatgaaatacattgaggacatgaaccgccggagggataatatgaaggagaaattacgtttgaaaaatgtttctctcaaagttcagaggaaaaaaatgcttttacaattgaggcagaaggaagaggtgagtgaggcccttcacgatgttgattttcagcagttgaagatagagaacgctcaatttcttgagacaattgaagcaaggaatcaagaactgacccagctaaagctgtcatctggaaacactctgcaggttctcaatgcctacaaaagcaagcttcacaaggcaatggaaatatacctcaatctggacaaggagatcttgctgagaaaagagctacttgaaaaaattgaaaaagaaacactacaagtagaggaggaccgggccaaagccgaggcagtgaataagaggctccggaagcagctggccgagttccgggcaccacaggtgatgacttacgtccgggagaagatcttaaatgcggacctggagaagagcatcaggatgtgggaaaggaaagtggagatagcagagatgtccttaaaaggccatcgtaaggcttggaatcgaatgaaaataaccaatgagcagttgcaggcagattaccttgctgggaagtagccagaggcaggccacggcttacagaccactacatgacctataaaagtaatcagctcctttctagtcacgggctcctctcactgttccctgtctgcctggtgttcccaaccccccacccaggctgagtatcatctcctgggccacatctgcccatggggagtgttttcacagcctggcccctggaactgttaccactgaaagaaccacagggcactctaatggtttgacacttgttagccagcatttagttcacaagcatagtgaaagtgaccttcccacacctgggagagggatagaggagggagagccagcccagtgtatgccatgggcttatccgtggcagccccagtgtgcaactatcaaaaacagacatcaaaacagcatggtgaatgcctggcactcagcattctcagtttactcttcagtttggtggggtagctcctggactagatactgctgcaaaagaaaacaagcacgaaggaaaccaagatgatttcttcgggctgatacaacctgttctgacctgcaaaaatcctaccttcccccacctccccaccgtaatagtcatagtataagggttgtacagacgcctcaggagacctgcctgattcctttacatccttctccctaacatctagactatctctagagctgtttcctagtcgtgaatgcgtgatggtccttctttgtccctgcaagtatgatccaacatggcccagttcagaatcagaatatgtcttctgtgtcatggtggcatttggtccatggtgggagaaagaaatcaacttttcccagtggtggagtgaggacaggggagggccggccctctcagccttggatgtgatccatttgctgtagtcttccaccttggtgtacagaaacaggccagggcacgtctcaccaccgaagttcaggactcctctcagaacccacagatcgaactgctgtagctggcacatcattgggcttcctgggtccccctgtgataaaagacagaaggcttcaagtcttagaaaaactagtttttgttgtaaatctatccttgtgcaatatactgtttgttctagaaatgttttacgctggttctcactggaaatggggcaaattataggatacaatttcaaatctaggcagccaccaccacaaattccaacaagatgacttttccttttattatgcaaattagctgtggacttctgctgattgcctatagcttcctggttcatatttcattttcttgcccctttccagtcctttggccaaaccttccctctcttctggcttctcattcctgaaatgttggtgtttgtttctgttttgtcctgaaatgctcacattttcccttctctgccttgcttcaacccttagtgtaagccacttcctgccacctggcaactgcttaccagcctggctggccgtgctctgggtcttccctactcccaatggagcagtcctctgggacttgggaattctgccacatacactttatctaacttaaagtgacggagtagaagcttggcatcattagctagatatgggaccctggcaagtgaccaaatcctctctgagccaaggtgggaacacagttaatgcctgtaacacgtgctgagcacagcacagtgcctggcacacagcaaacactcaatagaatattagctaccatcatcctgatgtcgctataaaggccagcatttttctgaaaagttggggaaaatgggaaaagcaacaaggcaactagtaggtatcacttaccttacctgcccagaccccacacccctaggtctcctctcaaaggaattcctgcccctcccatggcccatcttggtccgagaagggggtggtcatccccaggctagccagccacttctgacctgtgtggcctgcctggctggaaggcccaggcaatgacatgttgctctcgcagtttggactgagacatggaatggggccgcaattaacaacaggaaacaatctgaacagactgaaccacgagcagcagaaaggcagaagagcagccgcttcagccccttaccatccgagacctgggtgtgtggtctgtcttggtcactctctctgtctctctttctctctttctttctctgtccccaaggctggagtgcagtggtgcaatcttggctcactgcaacctccacctctgggattcaagcaattctcccacctcagcctctcgagtagctggggctacagctatgcgccaccatgcccagctaatttttttttttttttttgagatggagtcttgctctgtcccccatgctggagtgcagtggcatgatctcggctcgctgcaacctcctcctcctgggttcaagcgattctcctacctcagcctccccagtagctgggattacaggcgcccaccaccacacctggctaatttttatttttagtagagatggggtttcaccatgttggccaggctggtctcgaactcctgacctcatgatccacccgcctcggcctccccaagtgttgggattacaggcgtgagccactgcacccggcctaatttctgtatttttagtagagatggggtttcacgatgttggccaggctggtcttaatctaacttcaagtgatctgcccgcctcgccctctcaaagtgctgggattaggcatgaactaccatgcccagtggggtattctctttcaataaagctcctcttttccaaggaagccacaccagaacagagatgaagaccagtgggaaaacatgggagcaactccgtgggcaggccagcggggaggccatgctgcaaagctgccgtgattccctggtgatctctcagcaggccaaggccagacatgtgaggaaggccttgaggacttcattctgtgcctctccttggatggaagggggtgctttagtgtggcactcctgacttttcaattgactggtgaagaggcccttgtgtgcacctcactatgtctgcctaggtcatgggggctccctggccaagaatgacgtggttccccctttcatcagtccgattcgcagtttgtcttaactgtagtggtatagccagagcaagaaaaagaatgtgatttaggacaaatgattggatgagtgattggtagatgtcctcagctatggcgtggttttgcaggtcactgttccacccacctgggcacagcatatacgctttttctcttccccataatcctgtaggggctgcgacttctgaagcacaagaggcagaggcgaacagctccaggtgcccctctggagctaccctacctcatctcccaagggagcggccacagcccagagtggggtctttcattttgtgatcttttcccttgacattcagcaaaagccctgacagtggtagaataaaggcaggatgggtgagtgcagagtgattctgcttttgttgggtttcagggaaacccataggcagattctgaacctggtggttgattctacatgtgggaattgtggctttgaagacctctggacatgagaacatatttccaagacagaggattctatggggacgggtcaccattaaatggtgtgcaagcataattctgttcaaaaatgaaggcatgtttagaggtgtgtcacagttaaaaaccaacctgaactttgcagttagattttaaaagatggtcagttagagtagaaatagcttagaatattccattgagtctaagatacagttagaaatcaacatctttgaaattagggtgtgtcttttaatcagttgatgtcagagtttaacgggcagcatttttttctttcttgggattacaaaaaatgatggtgcattctataattggcagcatcttagatctgaggaagtatgatacttgtttgacggaatggttgacggcagaattttgttaaaaagctatatcttcactgtattttaacacattatctaatttaagaaattgttaagatcccccacctggcagaggacccagtacaaaataggcactcaatagatgttacaccaactttggaagggcaaacatatttcttaatgagaggcagtccttcatgttttgcaataaaatgacttttaaaaaaaaaaaaaaaaaaaaaaaaaaaaaaaaaaaaaaaa

SEQ ID NO: 303 - DNA, 760 bp, Homo sapiens
gaggaaccgagaggctgagactaacccagaaacatccaattctcaaactgaagctcgcactctcgcctccagcatgaaagtctctgccgcccttctgtgcctgctgctcatagcagccaccttcattccccaagggctcgctcagccagatgcaatcaatgccccagtcacctgctgttataacttcaccaataggaagatctcagtgcagaggctcgcgagctatagaagaatcaccagcagcaagtgtcccaaagaagctgtgatcttcaagaccattgtggccaaggagatctgtgctgaccccaagcagaagtgggttcaggattccatggaccacctggacaagcaaacccaaactccgaagacttgaacactcactccacaacccaagaatctgcagctaacttattttcccctagctttccccagacaccctgttttattttattataatgaattttgtttgttgatgtgaaacattatgccttaagtaatgttaattcttatttaagttattgatgttttaagtttatctttcatggtactagtgttttttagatacagagacttggggaaattgcttttcctcttgaaccacagttctacccctgggatgttttgagggtctttgcaagaatcattaatacaaagaattttttttaacattccaatgcattgctaaaatattattgtggaaatgaatattttgtaactattacaccaaataaatatatttttgtacaaaaaaaaaaaaaaa

SEQ ID NO: 304 - DNA, 3691 bp, Homo sapiens
ggcgcaacgctgagcagctggcgcgtcccgcgcggccccagttctgcgcagcttcccgaggctccgcaccagccgcgcttctgtccgcctgcagggcattccagaaagatgaggatatttgctgtctttatattcatgacctactggcatttgctgaacgcatttactgtcacggttcccaaggacctatatgtggtagagtatggtagcaatatgacaattgaatgcaaattcccagtagaaaaacaattagacctggctgcactaattgtctattgggaaatggaggataagaacattattcaatttgtgcatggagaggaagacctgaaggttcagcatagtagctacagacagagggcccggctgttgaaggaccagctctccctgggaaatgctgcacttcagatcacagatgtgaaattgcaggatgcaggggtgtaccgctgcatgatcagctatggtggtgccgactacaagcgaattactgtgaaagtcaatgccccatacaacaaaatcaaccaaagaattttggttgtggatccagtcacctctgaacatgaactgacatgtcaggctgagggctaccccaaggccgaagtcatctggacaagcagtgaccatcaagtcctgagtggtaagaccaccaccaccaattccaagagagaggagaagcttttcaatgtgaccagcacactgagaatcaacacaacaactaatgagattttctactgcacttttaggagattagatcctgaggaaaaccatacagctgaattggtcatcccagaactacctctggcacatcctccaaatgaaaggactcacttggtaattctgggagccatcttattatgccttggtgtagcactgacattcatcttccgtttaagaaaagggagaatgatggatgtgaaaaaatgtggcatccaagatacaaactcaaagaagcaaagtgatacacatttggaggagacgtaatccagcattggaacttctgatcttcaagcagggattctcaacctgtggtttaggggttcatcggggctgagcgtgacaagaggaaggaatgggcccgtgggatgcaggcaatgtgggacttaaaaggcccaagcactgaaaatggaacctggcgaaagcagaggaggagaatgaagaaagatggagtcaaacagggagcctggagggagaccttgatactttcaaatgcctgaggggctcatcgacgcctgtgacagggagaaaggatacttctgaacaaggagcctccaagcaaatcatccattgctcatcctaggaagacgggttgagaatccctaatttgagggtcagttcctgcagaagtgccctttgcctccactcaatgcctcaatttgttttctgcatgactgagagtctcagtgttggaacgggacagtatttatgtatgagtttttcctatttattttgagtctgtgaggtcttcttgtcatgtgagtgtggttgtgaatgatttcttttgaagatatattgtagtagatgttacaattttgtcgccaaactaaacttgctgcttaatgatttgctcacatctagtaaaacatggagtatttgtaaggtgcttggtctcctctataactacaagtatacattggaagcataaagatcaaaccgttggttgcataggatgtcacctttatttaacccattaatactctggttgacctaatcttattctcagacctcaagtgtctgtgcagtatctgttccatttaaatatcagctttacaattatgtggtagcctacacacataatctcatttcatcgctgtaaccaccctgttgtgataaccactattattttacccatcgtacagctgaggaagcaaacagattaagtaacttgcccaaaccagtaaatagcagacctcagactgccacccactgtccttttataatacaatttacagctatattttactttaagcaattcttttattcaaaaaccatttattaagtgcccttgcaatatcaatcgctgtgccaggcattgaatctacagatgtgagcaagacaaagtacctgtcctcaaggagctcatagtataatgaggagattaacaagaaaatgtattattacaatttagtccagtgtcatagcataaggatgatgcgaggggaaaacccgagcagtgttgccaagaggaggaaataggccaatgtggtctgggacggttggatatacttaaacatcttaataatcagagtaattttcatttacaaagagaggtcggtacttaaaataaccctgaaaaataacactggaattccttttctagcattatatttattcctgatttgcctttgccatataatctaatgcttgtttatatagtgtctggtattgtttaacagttctgtcttttctatttaaatgccactaaattttaaattcatacctttccatgattcaaaattcaaaagatcccatgggagatggttggaaaatctccacttcatcctccaagccattcaagtttcctttccagaagcaactgctactgcctttcattcatatgttcttctaaagatagtctacatttggaaatgtatgttaaaagcacgtatttttaaaatttttttcctaaatagtaacacattgtatgtctgctgtgtactttgctatttttatttattttagtgtttcttatatagcagatggaatgaatttgaagttcccagggctgaggatccatgccttctttgtttctaagttatctttcccatagcttttcattatctttcatatgatccagtatatgttaaatatgtcctacatatacatttagacaaccaccatttgttaagtatttgctctaggacagagtttggatttgtttatgtttgctcaaaaggagacccatgggctctccagggtgcactgagtcaatctagtcctaaaaagcaatcttattattaactctgtatgacagaatcatgtctggaacttttgttttctgctttctgtcaagtataaacttcactttgatgctgtacttgcaaaatcacattttctttctggaaattccggcagtgtaccttgactgctagctaccctgtgccagaaaagcctcattcgttgtgcttgaacccttgaatgccaccagctgtcatcactacacagccctcctaagaggcttcctggaggtttcgagattcagatgccctgggagatcccagagtttcctttccctcttggccatattctggtgtcaatgacaaggagtaccttggctttgccacatgtcaaggctgaagaaacagtgtctccaacagagctccttgtgttatctgtttgtacatgtgcatttgtacagtaattggtgtgacagtgttctttgtgtgaattacaggcaagaattgtggctgagcaaggcacatagtctactcagtctattcctaagtcctaactcctccttgtggtgttggatttgtaaggcactttatcccttttgtctcatgtttcatcgtaaatggcataggcagagatgatacctaattctgcatttgattgtcactttttgtacctgcattaatttaataaaatattcttatttattttgttacttggtacaccagcatgtccattttcttgtttattttgtgtttaataaaatgttcagtttaacatcccagtggagaaagttaaaaaa

SEQ ID NO: 305 - DNA, 1534 bp, Homo sapiens
ggaacgccaaccgcctgggcctagcgcagcttcctccgcccaccacggaagtgaggcggggatactaaagcgacggagcccggtggacggaagtgggtgttggaggctttaaggtagctttaaattcgtgttgtcctgggagctcgcccttttcggctggagtcgggctttacggcgccggatggctctggacgtgaagtctcgggcaaagcgttatgagaagctggacttccttggggagggacagtttgccaccgtttacaaggccagagataagaacaccaaccaaattgtcgccattaagaaaatcaaacttggacatagatcagaagctaaagatggtataaatagaaccgccttaagagagataaaattattacaggagctaagtcatccaaatataattggtctccttgatgcttttggacataaatctaatattagccttgtctttgattttatggaaactgatctagaggttataataaaggataatagtcttgtgctgacaccatcacacatcaaagcctacatgttgatgactcttcaaggattagaatatttacatcaacattggatcctacatagggatctgaaaccaaacaacttgttgctagatgaaaatggagttctaaaactggcagattttggcctggccaaatcttttgggagccccaatagagcttatacacatcaggttgtaaccaggtggtatcgggcccccgagttactatttggagctaggatgtatggtgtaggtgtggacatgtgggctgttggctgtatattagcagagttacttctaagggttccttttttgccaggagattcagaccttgatcagctaacaagaatatttgaaactttgggcacaccaactgaggaacagtggccggacatgtgtagtcttccagattatgtgacatttaagagtttccctggaatacctttgcatcacatcttcagtgcagcaggagacgacttactagatctcatacaaggcttattcttatttaatccatgtgctcgaattacggccacacaggcactgaaaatgaagtatttcagtaatcggccagggccaacacctggatgtcagctgccaagaccaaactgtccagtggaaaccttaaaggagcaatcaaatccagctttggcaataaaaaggaaaagaacagaggccttagaacaaggaggattgcccaagaaactaattttttaaagagaacactggacaacattttactactgagggaaatagccaaaaaggcaaataatggaaaaatagtaaacattaagtaaatgctgtagaagtgagtttgtaaatattctacacatgtaaaatatgtaaaactatgggttatttttattaaatgtattttaaaataaaaatttaattctggtttttctgattagagtgcaaaagtgagaaaagttcaatactcttgaaatgtagaattgaaaatgcattagggaaaacttaataaaaattattaccagttatttggaagatctgaaaaaaaaaaaaaaaaaa

SEQ ID NO: 306 - DNA, 4154 bp, Homo sapiens
ggctggtccgagcgcgttgcgggcgcccggcgtaaggggagtcgggtagcagcatcctcctgggcgccgctttcgcgcggcggcggcggctgcggcggggtctttctttgcttaaatacctcgttggccagaagcgctggtaccgggggcgggttgggtcgggtcgggcagtgctgcacacctgggtttccttgcctagagctgtgtgttcggggtcctttggtccagtcggaggctgcggagcggcgggggttgcctgcgctgtccgcccgggcatcctcccggtgatggaagcagccgccgccgccgctgcggggtcgcgctgtgccccatccaccgctgccagagaggtgggaaaattcgccgcacggaggccgaaagcgagaggggctgcgccgctatgccgggagctgagtcccatataagccgcccccagccatcgcccccagccggcttcgttcccctgagcgagacaggaagctgcggtcccgagaaagcggaggagacgtcgctggagccgggaggcgccgggttcggcggagcgcggagcggggctctgggccgcgtgaaagtttttcttcccgagccgcagggcgcccgctgcccggaaactgcccagggataagtcggccgactccccagacccctcgaaggtgcggggacccccagcggaagcgagagggagcgaaatcgaggaacgagtgacagccggacagtccgccgggcggtgatccggggccgctcccgggcgcgccctcggctccaggtcctacccggagccgctgccatgggagagccagccttgggcgctggggaccagccgccgcgcccgcctcggagtcgcggcccgagtcccggcgccagcagccagcccgctgcgtccccttcccgggctgcagggctgcctccgccgcgccgccggcccggattgtgcctgtgatgagccgcagcccgcagcgagctctgcccccgggcgcgctccctcggctgctccaggctgcgcctgcagccgcgccgcgtgccctgctcccgcagtggccccggcgcccaggacgccgctggcccgcgtcccctctcggaatgaaggtgttccgtaggaaggcgctggtgttgtgcgcgggctatgcactgctgctggtgctcactatgctcaacctcctggactacaagtggcacaaggagccgctgcagcagtgcaaccccgatgggccgctgggtgccgcagcgggggcagccggaggcagctgggggcgcccagggccgcctccggccgggccgccccgtgctcatgcccgtttggacctccgcactccttaccgccctcccgctgccgccgtcggggcggctcctgcagccgcggcagggatggcgggggttgcggcccctccaggcaatggcactcggggcaccgggggcgtcggggacaagcggcagctggtgtacgtgttcaccacgtggcgctctggctcgtcgttcttcggcgagctattcaaccagaatcccgaggtgttctttctctacgagccagtgtggcatgtatggcaaaaactgtatccgggggacgccgtttccctgcagggggcagcgcgggacatgctgagcgctctttaccgctgcgacctctctgtcttccagttgtatagccccgcgggcagcggggggcgcaacctcaccacgctgggcatcttcggcgcagccaccaacaaggtggtgtgctcgtcaccactctgccccgcctaccgcaaggaggtcgtggggttggtggacgaccgcgtgtgcaagaagtgcccgccacagcgcctggcgcgtttcgaggaggagtgccgcaagtaccgcacactagtcataaagggtgtgcgcgtcttcgacgtggcggtcttggcgccactgctgcgagacccggccctggacctcaaggtcatccacttggtgcgtgatccccgcgcggtggcgagttcacggatccgctcgcgccacggcctcatccgtgagagcctacaggtggtgcgcagccgagacccgcgagctcaccgcatgcccttcttggaggccgcgggccacaagcttggcgccaagaaggagggcgtgggcggccccgcagactaccacgctctgggcgctatggaggtcatctgcaatagtatggctaagacgctgcagacagccctgcagccccctgactggctgcagggccactacctggtggtgcggtacgaggacctggtgggagaccccgtcaagacactacggagagtgtacgattttgtgggactgttggtgagccccgaaatggagcagtttgccctgaacatgaccagtggctcgggctcctcctccaagcctttcgtggtatctgcacgcaatgccacgcaggccgccaatgcctggcggaccgccctcaccttccagcagatcaaacaggtggaggagttttgctaccagcccatggccgtcctgggctatgagcgggtcaacagccctgaggaggtcaaagacctcagcaagaccctgcttcggaagccccgtctctaaaaggggttcccaggagacctgattccctgtggtgatacctataaagaggatcgtagtgtgtttaaataaacacagtccagactcaaacggaggaagcccacatattctattatagatatataaataatcacacacacacttgctgtcaatgttttgagtcagtgcatttcaaggaacagccacaaaatacacacccctaagaaaaggcaagacttgaacgttctgaccaggtgcccctcttcttctttgccttctcttgtcctctttctcctatttcttaccctgtcctccacctgccttccattttgaagtgggatgttaatgaaatcaagttccagtaacccaaatcttgtttacaaaatattcgtggtatctgtgaacatgttaagagtaatttggatgtgggggtgggggtggagaaaggggaagtggtccagaaacaaaaagccccattgggcatgataagccgaggaggcattcttctaaagcagacttttgtgtaaaaagcaaaggttacatgtgagtattaataaagaagataataaataatattctttttaatatttgcctccattactttggattcacctgtgttacttgtcctcagcttcagatagaatctccttcccctccctcgtttccatttttccagtctctttcctgaaaggcagctaaactgggtgggagcaatttttgcctccttggtaataacctgggggatgttttctcacatgtaaatctcagcctgttaggtgtccaggagtgaaacacatctttgtattctaaaggcagaaaccaaacagggcagtggaagaaaaagcacactactctcttcaactttgaacacaggaagaagcaactccttcaggacttgaaggcatttggtttttcattcctcttcagttaaaatggggaaccttgaagcagagaccaatgttttggtgctgaggctggttcagaaaaaggatttttaaaaaaagtatgtaatttttaaaagttctgatgattagaacacagacctcaggaaagtagcgtgaacatactgctggcgatggtagcagcttcgttggtttagcaaagtgacagaagtatctatttggagtgtttttctgaccctgacacggtatgtggaggtggatgaaagcagcgaagtttcatctgagaaccgtaagggttttcccttttcttacttgcttcccatttaaatcagtgcaagagagaatatgaatttataatgctttacttgggatgcctgtggaatatgttgcttttctttatcatgtttcctaaaagtaaatttgcaaagaaagtaacatgctgcagacagtataaggcttcagccaagagcttcttttagatatgataatgaattgtggtaaagaggaaatgaaaatgaactagtgtgtaggattttgaaatttggtattttccagggagaaaaccgttacattttcctgtagtggttatgatgttgtgtcctgaacccatttggtactgaaacattctgcagaatgttatactatgagaagaaattgtgaagcccaaatgggaacaagagacagtgtagttgtatatgacagtaaatacagtacaagttcactatcaaaaaaaaaaaaaaaaaa

SEQ ID NO: 307 - DNA, 1397 bp, Homo sapiens
aggatgtgtagggggcggggcccggcggaagcgtatataaggccgggctcggggacgcccccccctcactcgcgcgttaggaggctcgggtcgttgtggtgcgctgtcttcccgcttgcgtcagggacctgcccgactcagtggccgccatggcatcagatgaaggcaaactttttgttggagggctgagttttgacaccaatgagcagtcgctggagcaggtcttctcaaagtacggacagatctctgaagtggtggttgtgaaagacagggagacccagagatctcggggatttgggtttgtcacctttgagaacattgacgacgctaaggatgccatgatggccatgaatgggaagtctgtagatggacggcagatccgagtagaccaggcaggcaagtcgtcagacaaccgatcccgtgggtaccgtggtggctctgccgggggccggggcttcttccgtgggggccgaggacggggccgtgggttctctagaggaggaggggaccgaggctatggggggaaccggttcgagtccaggagtgggggctacggaggctccagagactactatagcagccggagtcagagtggtggctacagtgaccggagctcgggcgggtcctacagagacagttatgacagttacgctacacacaacgagtaaaaacccttcctgctcaagatcgtccttccaatggctgtgtgtttaaagattgtgggagcttcgctgaacgttaatgtgtagtaaatgcacctccttgtattcccactttcgtagtcatttcggttctgatcttgtcaaacccagcctgaccgcttctgacgccgggatggcctcgttactagacttttctttttaaggaagtgctgtttttttttgagggttttcaaaacattttgaaaagcatttacttttttgaccacgagccatgagttttcaaaaaaatcgggggttgtgtgggtttttggtttttgttttagtttttggttgcgttgcctttttttttttagtggggttggccccatgaagtgggtgccccactcacttctctgagatcgaacggactgtgaatccgctctttgtcggaagctgagcaagctgtggcttttttccaactccgtgtgacgtttctgagtgtagtgtggtaggaccccggcgggtgtggcagcaactgccctggagccccagcccctgcgtccatctgtgctgtgcgccccacagtagacgtgcagacgtccctgagaggttcttgaagatgtttatttatattgtccttttttactggaagacgtacgcatactccatcgatgttgtatttgcagtggctgaggaattcttgtacgcagttttctttggctttacgaagccgattaaaagaccgtgtgaaatgaa

SEQ ID NO: 308 - DNA, 1936 bp, Homo sapiens
acacagctcattgttggcagctgccgggcggtcctgccgagctgtgagggcaacggaggggaaataaaagggaacggctccgaatctgccccagcggccgctgcgagacctcggcgccgacatcgcgacagcgaagcgctttgcacgccaggaaggtcccctctatgtgctgctgagccggtcctggacgcgacgagcccgccctcggtcttcggagcagaaatcgcaaaaacggaaggactggaaatggcagaccatatgatggccatgaaccacgggcgcttccccgacggcaccaatgggctgcaccatcaccctgcccaccgcatgggcatggggcagttcccgagcccccatcaccaccagcagcagcagccccagcacgccttcaacgccctaatgggcgagcacatacactacggcgcgggcaacatgaatgccacgagcggcatcaggcatgcgatggggccggggactgtgaacggagggcaccccccgagcgcgctggcccccgcggccaggtttaacaactcccagttcatgggtcccccggtggccagccagggaggctccctgccggccagcatgcagctgcagaagctcaacaaccagtatttcaaccatcacccctacccccacaaccactacatgccggatttgcaccctgctgcaggccaccagatgaacgggacaaaccagcacttccgagattgcaaccccaagcacagcggcggcagcagcacccccggcggctcgggcggcagcagcacccccggcggctctggcagcagctcgggcggcggcgcgggcagcagcaacagcggcggcggcagcggcagcggcaacatgcccgcctccgtggcccacgtccccgctgcaatgctgccgcccaatgtcatagacactgatttcatcgacgaggaagttcttatgtccttggtgatagaaatgggtttggaccgcatcaaggagctgcccgaactctggctggggcaaaacgagtttgattttatgacggacttcgtgtgcaaacagcagcccagcagagtgagctgttgactcgatcgaaaccccggcgaaagaaatcaaacccccaacttcttcggcgtgaattaaaagaaacattcccttagacacagtatctcacttttcagatcttgaaaggtttgagaacttggaaacaaagtaaactataaacttgtacaaattggttttaaaaaaaattgctgccacttttttttcctgtttttgtttcgtttttgtagccttgacattcacccacctcccttatgtagttgaaatatctagctaacttggtctttttcgttgtttgtttttactcctttccctcactttctccagtgctcaactgttagatattaatcttggcaaactgcttaatcttgtggattttgtagatggtttcaaatgactgaactgcattcagatttacgagtgaaaggaaaaattgcattagttggttgcatgaacttcgaagggcagatattactgcacaaactgccatctcgcttcatttttttaactatgcatttgagtacagactaatttttaaaatatgctaaactggaagattaaacagatgtgggccaaactgttctggatcaggaaagtcatactgttcactttcaagttggctgtcccccccgccgccccccccacccccatatgtacagatgataatagggtgtggaatgtcgtcagtggcaaacatttcacagatttttattttgtttctgtcttcaacatttttgacactgtgctaatagttatattcagtacatgaaaagatactactgtgttgaaagctttttaggaaattttgacagtatttttgtacaaaacatttttttgaaaaaatacttgttaatttattctattttaatttgccaatgtcaataaaaagttaagaaataac

SEQ ID NO: 309 - DNA, 5233 bp, Homo sapiens
cgaggattgtgagtggaccgttgaggagagcgaccgaccatccggctggtgtccggactcgtactctatggttgtccgcgctctgcgcttcctctctagccgccagtgctctatgctccgcggtcgcgggccgccagcctccagccggccagccgcgaggggtgcgcagagggaggcggggcggaaaggcgagaggtgtctcctccaccggagccaggggagacccgagcaagctccgtgacagcacgtcggccgccatgtcgccgagtggggctggaaacagacccggcgcccagcggtagccctccttgcgcctccgattcccagacatggaaggtctttaatgtaactttaaatggttcaccaaaggatgctctaatggatgacagcgatactcctacatattatctgcaaatagaaccacaagatggatgtcatcctggtgacagcgtggaaaggagtgtgacctgtctgccttctgcatcagatgaaaatgaaaatcagcttgacggggacgggcatgagcatctgaccagcagtgacagtgcgatgggaaagccccaagtgtctgagcaggacagtctcaataataatgaaagctgcacattgagctgcgaggtggctgcaggtgagaacttgcaaaacaccctttgtgaagcctccagagatgaacaggccttcttgggaaaggacaaaaaaattcctggaaaaagaagtccaagaagcaaaaaagggactgctaagaagataccaccaggacttttttcaggagatattgcacctttaatgcaagaaaaagtactaagcgcagtcacatatgctgttgatgatgaagaagctgctgaagtaaatgctaatgagcagccagaggcgccaaagcttgttctgcagtctctgttttcacttatacgaggtgaagttgagcagttggattcaagagcacttcccctttgccttcatcagatagcagaatcctatttccaggaggaggactatgagaaagcaatgaaattcattcagctagaacgattgtatcatgagcaattgctcgcaaatctttctgccattcaagaacagtgggaaacaaaatggaaaactgtgcaaccacatacagttacggctctaaggaattcagaaaagggatttaatggtgaagattttgaacggcttacgaaaatttgtgcaacacatcaagatcctcttttatccaaacataagatagcagctgtggagaagtcccaggaaaggaaatgctccacgcagttactagtgtctgaagatccaaaggaaggaggagctaccaccaaagagtcagagagtaaaacttgtctcggcacagagtcaagtaaagaaagccaacatacagtggagcccctggggagcagtccctgctgtcatcagatggacgtgcaaacagattccccaagcctttcggtaactgcaggaaaggaccacatggaggagctgctctgcagcgctgaagccacgttagcgctccacacccagtcctccgagacagcagggagcccgtctgggccagactcttctgaggatgcttgtgaggatgacagtcgcttgcagctggctcaaacagaggcctgccaggatgtggccagaatagagggcattgctgaagaccctaaggtgtttctttccagcaagtcaaagacagagccgttgatttcaccaggctgtgaccgtatacctcctgcattgatttctgagggtaaatattcacaggctcagaggaaagaactccgtttgccacttcgggatgcttctgaggcgttgcccacagaccaacttgagaacaatgaattaaatgagctgcagcagcctgatcttacagacagtgatggaaaatcaccacaggcgcaggctgactcagacggttctgagaatgtgctctgtggaaataatcaaatatctgacttaggcatactgcttccagaggtgtgtatggccccagaggaaaagggagataaagacgaccaactcaacaaagaaacagaagactatttgaacagccttttagaaggatgtttaaaagatactgaagattccctttcctatgaagataaccaagacgacgactccgatctccttcaagatctctctcctgaagaagcatcctatagtctccaggagaatctgccttctgatgagagctgtctttctcttgatgatcttgccaaaaggatagagattgcagaggttgttcctactgaaggattggtctccatattaaagaagaggaatgatactgtaggagatcatcctgcccaaatgcaacacaaaccatctaagcgaagagtgagattccaagaaatagacgatagcttggatcaagatgaagttggaggtggctcctgtattttgctggtcttgctgtgcatagcaacggttttcctcagtgttggaggaactgcattatactgcactttcggtgacatggagtcacctgtttgtactgactttgcagacaacatggacttctattacactaagttacttcagggagtggcagaactgaagcactggatctacctctcctagcagcattccagacacagacatgctggcagtgagagtgaaaggcgggagactttctaaacagtttttctttcaggaattctgtagcattcccccttccctctgttaggaaccaaggacatcagaaatagcaactttaagtggcaagccggaggaactctgttagaataatccacacagtgaggcaaatatcaatctaagcattgtggatggaaggaatggtctttggagagagcatatccatctcctcctcactgcctcctaatgtcatgaggtacactgagcagaattaaacagggtagtcttaaccacactatttttagctaccttgtcaagctaatggttaaagaacacttttggtttacacttgttgggtcatagaagttgctttccgccatcacgcaataagtttgtgtgtaatcagaaggagttaccttatggtttcagtgtcattctttagttaacttgggagctgtgtaatttaggctttgcgtattatttcacttctgttctccacttatgaagtgattgtgtgtttgcgtgtgtgtgcgtgcgcatgtgcttccggcagttaacataagcaaatacccaacatcacaaagatgatctttcttcttttaacttgatgatgatgtgcaggcacaaatctttggagaaggcttaactgtggaatagatgaattctagaactcttgaccctgcaatgagaaactgtgacagatctgtgtcaattaacttgattagccagaaattaatcacaggcctagagaccaaagaaaaagctcccctgagtctcaggcaacagttttgtcacggatgcaaagcttcctgaaatcatgaatgctggactcagtttggcaaacgcttacacctattatgttctgagattctgagaaccagaatgcaaacttaagtaagatacagttcccactgtaggtgttttaatcctggtcttatatagaataaaccagtactttgctgagtgaaatcaccatatagaattcagtattaacagatcatgcattcagatgcttgaatgtgcattcttgttgtgggcttgatttagatcctattgcggggtcattacgcaaaaattcaatcataccttccatagacaaatgtctgatttttgtttaaatctgtccgttaggtggcctttccttatctgaggtgtagtggtctaacatttaggaagccttgctttgactttatcgggcagcattaaaaaaaaaacaacaaagaaaaaccaaacatgaattatagtttttaacaagtgatctttatttcctgtcttctgttaggatcatttgaaagaaaaagggagaacttactttctagttgttactggctggcacagtacctccctttgtgtttctgcttatttatttagattatgtgaatcttaaagggctttttatatcagttgaaagtgtgttactgcgcatgcatttggtgattccagtgctagatatttaattactgtgtatttagtgttttgattttctataatttcagttccgcgtgtttttacacttgttcattttaaattgatgtttcattttcacttataatactgtttgacttgtctctatcatgtcaccataaactgtaatattttcaagggttatagatcaaagatatttatttagaaatgtacaagataatgaaatttagattccttatacttaaggctgattttattagaagattattttaatgttctattataaattttaagaatttgtattcaaattgtatgtaaaatatgtaaaatgttgacggtactatattaagtggttctataaaagctattcacaagttctactgtgatggacatcctcatcatagacaaacctcctctgttttatcctcaatttctagttacagaaatttggtgatgcttatttttgccaattttatgtcaaaataagttaaaacttccctcctgttcacctcttgggtctctatcctgtgtaacctctggtgtagtatttgcccataggcaaccagagccacttcctctgaacccaacatctcctggggaccttcgcagcaagaggaaagcactgagacaatagcttgctaagcaggggcccagtggtgtctcagagaaaccatgggtgtcctcgccacttcccagggagggtgaggtgagctcgggaacataacgatgttttgacttacaataggcatgaaatcgcaactagaaaaattagggcagtttttaaaaatgtcatagttatctattgcatgaactggagtaattccacctggtggtgaaaggattgttatttcacacatgaaaaattcatccagttttactaaaatgtaattttttctgtcatttgaaagtactgacaactatttgtaactaatcttccttaagaactgtatttgagggtatcaaatcaagcttgtaatttaaaatctgtaccaacaaagtgtctcagagagtttatttgaaccattgggtgctgagaaaaaactgctttaaagtgaaactttgatttcagaagttgatctggccctacaagtagacagtcatctactttgggaagactaataggtccttaggtaacggctcttctgctttaaaatacctcccccatctgctgacagtagctgaagattattctaaacattcattcttttagatttaaaaataaaaatcttctggagga

SEQ ID NO: 310 - DNA, 6523 bp, Homo sapiens
gtaggaattgagtgaagaaaaagtttgcaagtctggacagaagggaaaagttctcctgagagaccggctttggggaggggaggggggaaggaagagtagctccttcttcttcttcttttttttttcttccactcttaaaaagcttctttctcttcacccaagcctcactgtccctctccggctctagctctctccatataaaccctcaagattatgtcaattggttagagccagccgggaatttcgtgcgggtgctgaaggagctgcgggagccggagaagaatgaaactgcgtggagtcagcctggctgccggcttgttcttactggccctgagtctttgggggcagcctgcagaggctgcggcttgctatgggtgttctccaggatcaaagtgtgactgcagtggcataaaaggggaaaagggagagagagggtttccaggtttggaaggacacccaggattgcctggatttccaggtccagaagggcctccggggcctcggggacaaaagggtgatgatggaattccagggccaccaggaccaaaaggaatcagaggtcctcctggacttcctggatttccagggacaccaggtcttcctggaatgccaggccacgatggggccccaggacctcaaggtattcccggatgcaatggaaccaagggagaacgtggatttccaggcagtcccggttttcctggtttacagggtcctccaggaccccctgggatcccaggtatgaagggtgaaccaggtagtataattatgtcatcactgccaggaccaaagggtaatccaggatatccaggtcctcctggaatacaaggcctacctggtcccactggtataccagggccaattggtcccccaggaccaccaggtttgatgggccctcctggtccaccaggacttccaggacctaaggggaatatgggcttaaatttccagggacccaaaggtgaaaaaggtgagcaaggtcttcagggcccacctgggccacctgggcagatcagtgaacagaaaagaccaattgatgtagagtttcagaaaggagatcagggacttcctggtgaccgagggcctcctggacctccagggatacgtggtcctccaggtcccccaggtggtgagaaaggtgagaagggtgagcaaggagagccaggcaaaagaggtaaaccaggcaaagatggagaaaatggccaaccaggaattcctggtttgcctggtgatcctggttaccctggtgaacccggaagggatggtgaaaagggccaaaaaggtgacactggcccacctggacctcctggacttgtaattcctagacctgggactggtataactataggagaaaaaggaaacattgggttgcctgggttgcctggagaaaaaggagagcgaggatttcctggaatacagggtccacctggccttcctggacctccaggggctgcagttatgggtcctcctggccctcctggatttcctggagaaaggggtcagaaaggtgatgaaggaccacctggaatttccattcctggacctcctggacttgacggacagcctggggctcctgggcttccagggcctcctggccctgctggccctcacattcctcctagtgatgagatatgtgaaccaggccctccaggccccccaggatctccaggtgataaaggactccaaggagaacaaggagtgaaaggtgacaaaggtgacacttgcttcaactgcattggaactggtatttcagggcctccaggtcaacctggtttgccaggtctcccaggtcctccaggatctcttggtttccctggacagaaaggggaaaaaggacaagctggtgcaactggtcccaaaggattaccaggcattccaggagctccaggtgctccaggctttcctggatctaaaggtgaacctggtgatatcctcacttttccaggaatgaagggtgacaaaggagagttgggttcccctggagctccagggcttcctggtttacctggcactcctggacaggatggattgccagggcttcctggcccgaaaggagagcctggtggaattacttttaagggtgaaagaggtccccctgggaacccaggtttaccaggcctcccagggaatatagggcctatgggtccccctggtttcggccctccaggcccagtaggtgaaaaaggcatacaaggtgtggcaggaaatccaggccagccaggaataccaggtcctaaaggggatccaggtcagactataacccagccggggaagcctggcttgcctggtaacccaggcagagatggtgatgtaggtcttccaggtgaccctggacttccagggcaaccaggcttgccagggatacctggtagcaaaggagaaccaggtatccctggaattgggcttcctggaccacctggtcccaaaggctttcctggaattccaggacctccaggagcacctgggacacctggaagaattggtctagaaggccctcctgggccacccggctttccaggaccaaagggtgaaccaggatttgcattacctgggccacctgggccaccaggacttccaggtttcaaaggagcacttggtccaaaaggtgatcgtggtttcccaggacctccgggtcctccaggacgcactggcttagatgggctccctggaccaaaaggtgatgttggaccaaatggacaacctggaccaatgggacctcctgggctgccaggaataggtgttcagggaccaccaggaccaccagggattcctgggccaataggtcaacctggtttacatggaataccaggagagaagggggatccaggacctcctggacttgatgttccaggacccccaggtgaaagaggcagtccagggatccccggagcacctggtcctataggacctccaggatcaccagggcttccaggaaaagcaggtgcctctggatttccaggtaccaaaggtgaaatgggtatgatgggacctccaggcccaccaggacctttgggaattcctggcaggagtggtgtacctggtcttaaaggtgatgatggcttgcagggtcagccaggacttcctggccctacaggagaaaaaggtagtaaaggagagcctggccttccaggccctcctggaccaatggatccaaatcttctgggctcaaaaggagagaagggggaacctggcttaccaggtatacctggagtttcagggccaaaaggttatcagggtttgcctggagacccagggcaacctggactgagtggacaacctggattaccaggaccaccaggtcccaaaggtaaccctggtctccctggacagccaggtcttataggacctcctggacttaaaggaaccatcggtgatatgggttttccagggcctcagggtgtggaagggcctcctggaccttctggagttcctggacaacctggctccccaggattacctggacagaaaggcgacaaaggtgatcctggtatttcaagcattggtcttccaggtcttcctggtccaaagggtgagcctggtctgcctggatacccagggaaccctggtatcaaaggttctgtgggagatcctggtttgcccggattaccaggaacccctggagcaaaaggacaaccaggccttcctggattcccaggaaccccaggccctcctggaccaaaaggtattagtggccctcctgggaaccccggccttccaggagaacctggtcctgtaggtggtggaggtcatcctgggcaaccagggcctccaggcgaaaaaggcaaacccggtcaagatggtattcctggaccagctggacagaagggtgaaccaggtcaaccaggctttggaaacccaggaccccctggacttccaggactttctggccaaaagggtgatggaggattacctgggattccaggaaatcctggccttccaggtccaaagggcgaaccaggctttcacggtttccctggtgtgcagggtcccccaggccctcctggttctccgggtccagctctggaaggacctaaaggcaaccctgggccccaaggtcctcctgggagaccaggtctaccaggtccagaaggtcctccaggtctccctggaaatggaggtattaaaggagagaagggaaatccaggccaacctgggctacctggcttgcctggtttgaaaggagatcaaggaccaccaggactccagggtaatcctggccggccgggtctcaatggaatgaaaggagatcctggtctccctggtgttccaggattcccaggcatgaaaggacccagtggagtacctggatcagctggccctgagggggaaccgggacttattggtcctccaggtcctcctggattacctggtccttcaggacagagtatcataattaaaggagatgctggtcctccaggaatccctggccagcctgggctaaagggtctaccaggaccccaaggacctcaaggcttaccaggtccaactggccctccaggagatcctggacgcaatggactccctggctttgatggtgcaggagggcgcaaaggagacccaggtctgccaggacagccaggtacccgtggtttggatggtccccctggtccagatggattgcaaggtcccccaggtccccctggaacctcctctgttgcacatggatttcttattacacgccacagccagacaacggatgcaccacaatgcccacagggaacacttcaggtctatgaaggcttttctctcctgtatgtacaaggaaataaaagagcccacggtcaagacttggggacggctggcagctgccttcgtcgctttagtaccatgcctttcatgttctgcaacatcaataatgtttgcaactttgcttcaagaaatgactattcttactggctctctaccccagagcccatgccaatgagcatgcaacccctaaagggccagagcatccagccattcattagtcgatgtgcagtatgtgaagctccagctgtggtgatcgcagttcacagtcagacgatccagattccccattgtcctcagggatgggattctctgtggattggttattccttcatgatgcatacaagtgcaggggcagaaggctcaggtcaagccctagcctcccctggttcctgcttggaagagtttcgttcagctcccttcatcgaatgtcatgggaggggtacctgtaactactatgccaactcctacagcttttggctggcaactgtagatgtgtcagacatgttcagtaaacctcagtcagaaacgctgaaagcaggagacttgaggacacgaattagccgatgtcaagtgtgcatgaagaggacataacattttgaagaattccttttgtgttttaaaatgtgatatatatatatataaaattcctaggatgcagtgtctcattgtccccaactttactactgctgccgtcaatggtgctactatatatgatcaagataacatgctgactagtaaccatgaagattcagatgtacctcagcaatgcgccagagcaaagtctctattatttttctactaaagaaataaggaagtgaatttactttttgggtccagaatgactttctccaagaattataagatgaaaattatatattttgcccagttactaaaatggtacattaaaaattcaattaagagaagagtcacattgagtaaaataaaagactgcagtttgtgggaagaattatttttcacggtgctactaatcctgctgtatcccgggtttttaatataaaggtgttaagcttattttgctttgtaagtaaagaatgtgtatattgtgaacagccttttagctcaaaatgttgagtcatttacatatgacatagcatgaatcactctttacagaaaatgtaggaaaccctagaatacagacagcaatattttatattcatgtttatcaaagtgagaggacttatattcctacatcaagttactactgagagtaaatttattttgagttttatcccgtaagttctgttttgattttttttaaaaaacaaacccttttagtcactttaatcagaattttaaatgttcatgttacataccaaattataatatctaatggagcaatttgtcttttgctatattctccaagattatctcttaagaccatatgccccctgttttaatgtttcttacatcttgtttttactcatttctgactggacaaagttcttccaaacaattctgagaaacaaaaacacacacgcagaattaacaattcttttccctgtgcttcttatgtaagaatcctcctgtggcctctgcttgtacagaactgggaaacaacacttggttagtctcttttaagttacaaaaagccaattgatgtttcttattctttttaaattttaaatattttgttataaatactcacaggataccttatttccctagctatcatctcctgacttaatgttttttaaacccaccaatataaatttaattaaagatatatgttgtaaggataaaaaaaaaaaaaaaa

SEQ ID NO: 311 - DNA, 3310 bp, Homo sapiens
gggggcggggctaagccttccctcacaaggggcctgtggtcaacgcgatttgcttccaagggacggccaccagtcggcacaggaaaggggcagaggcagtgagttcagcgtgtggacgagggtcaacaagtttgggatcaagcggctgccgctcctccaaaagcgaccgaagcgcgagcagattacccctccgagccagtgtagtaaacacacttcagaaacgtgaggtgccggtggtcacgaggggagcgcgccctccaatgaggagccgggggcggggccgaggccgctgacgcggcggcggcggcagagtcacccgggcagcctcgggaccggtcaccggccggcaaccgtccagcggcctcgaccaccgcctctagcctccgttcccggtcctttctcccgggccgagagacagcgtcgccgacaggggctcattcccctccggttctcctcggtgactcacctcgggcgggccgttttgtctttaggggccgccttggtggggcgaggtttccgtgacgaatctcctggggccgtccgtgccggctcgggccgtcgtggcggctcgagctcctggaacttgctcaggctccggaggtccgaggccctcgaagttatgcgtcgcctccaggcggttgcggcgggcgcgggctcctaaagggcgtcacacccggactccgccgactaggcaacctccattcatctttccactgcgcctccggcgcccccgccttctccggtcccctcctcggagtcattttttcctgttccccctctgccgccctttcctcacgccccgggtgaggcaattctcttggaagcgaaggtgtcggctatgagccggagcctccttccttgaatttctccgtggaggacccgccgcgccccccggcatgggggtgaacgccgtgcactggttccgaaaggggctccggctccacgacaaccccgccctgaaggagtgcattcagggcgccgacaccatccgctgcgtctacatcctggacccctggttcgccggctcctccaatgtgggcatcaacaggtggcgatttttgcttcagtgtcttgaggatcttgatgccaatctacgaaaattaaactcccgtctgtttgtgattcgtggacaaccagcagatgtgtttcccaggcttttcaaggaatggaacattactaaactttcaattgagtatgattctgagccctttggaaaggaacgagacgcagctattaagaaactggcaactgaagctggagtagaagtcattgtaagaatttcacatacattatatgacctagacaagatcatagaactcaatggtggacaaccgcctctaacttataaaagattccagactctcatcagcaaaatggaaccactagagataccagtagagacaattacttcagaagtgatagaaaagtgcacaactcctctgtctgatgaccatgatgagaaatatggagtcccttcactggaagagctaggttttgatacagatggcttatcctctgcagtgtggccaggtggagaaactgaagcacttactcgtttggaaaggcatttggaaagaaaagcttgggtggcaaattttgaaagacctcgaatgaatgcgaattctctgcttgcaagccctactggacttagtccttatctccgatttggttgtttgtcatgtcgactgttttacttcaaactaacagatctctacaaaaaggtaaagaagaacagttcccctcccctttccctttatgggcaactgttatggcgtgaatttttctatacagcagcaacaaataatccacgctttgataaaatggaaggaaaccctatctgtgttcagattccttgggataaaaatcctgaggctttagccaaatgggcggaaggccggacaggctttccatggattgatgccatcatgacacagcttcgtcaggagggttggattcatcatctagccaggcatgcagttgcttgcttcctgacacgaggggacctgtggattagttgggaagaaggaatgaaggtatttgaagaattattgcttgatgcagattggagcataaatgctggaagttggatgtggctgtcttgtagttccttttttcaacagttttttcactgctattgccctgttggttttggtaggagaacagatcccaatggagactatatcaggcgttatttgcctgtcctaagaggcttccctgcaaaatatatctatgatccctggaatgcaccagaaggtatccaaaaggtagccaaatgtttgataggagttaattatcctaaaccaatggtgaaccatgctgaggcaagccgtttgaatatcgaaaggatgaaacagatctatcagcagctttcacgatatagaggactaggtcttctggcatcagtaccttctaatcctaatgggaatggaggcttcatgggatattctgcagaaaatatcccaggttgtagcagcagtggaagttgctctcaagggagtggtattttacactatgctcatggcgacagtcagcaaactcacctgttgaagcaaggaagaagctccatgggcactggtctcagtggtgggaaacgtcctagtcaggaagaggacacacagagtattggtcctaaagtccagagacagagcactaattagaaaacattcaggaggaatactgttgcagctgaaattggtggggagttcaatacttttcaattaagttatttaaaaatattcttcattgatggaaagcagttacatattgaaatatgttgtttctaatgacatttctgtggtttttaactttttaatgaatttcacagaggacaattggtaatttgtatataaagaacttggcaagagaatttgcttaatgtaaatataaacagtcacaattagtatagacccatcgatatatttttgataatttttcatgtatggtaaagttaaaatgacaaattgatattctgatataaaactcaaagttttgaagtcagtgggaaaaaaggaggtttttagactttcttaaaagacgttaaaattttaggacagaattttcttgatgttgtttgatctaactttgcactctttgataataatgttttagataatgtgcgtaatccaaattggtattgtagcctctgttaacacagacagtatatgttttaaactttgatgtaaacctttttagacccaaacttgtggaagtatcatgtgttaagttctctgtctctgtttctttgttcatttattactaaaatgaacttgttattaaagtatatgcaaatatgaaaaaaaaaaaaaaaaaa

SEQ ID NO: 312 - DNA, 800 bp, Homo sapiens
acacagagagaaaggctaaagttctctggaggatgtggctgcagagcctgctgctcttgggcactgtggcctgcagcatctctgcacccgcccgctcgcccagccccagcacgcagccctgggagcatgtgaatgccatccaggaggcccggcgtctcctgaacctgagtagagacactgctgctgagatgaatgaaacagtagaagtcatctcagaaatgtttgacctccaggagccgacctgcctacagacccgcctggagctgtacaagcagggcctgcggggcagcctcaccaagctcaagggccccttgaccatgatggccagccactacaagcagcactgccctccaaccccggaaacttcctgtgcaacccagattatcacctttgaaagtttcaaagagaacctgaaggactttctgcttgtcatcccctttgactgctgggagccagtccaggagtgagaccggccagatgaggctggccaagccggggagctgctctctcatgaaacaagagctagaaactcaggatggtcatcttggagggaccaaggggtgggccacagccatggtgggagtggcctggacctgccctgggccacactgaccctgatacaggcatggcagaagaatgggaatattttatactgacagaaatcagtaatatttatatatttatatttttaaaatatttatttatttatttatttaagttcatattccatatttattcaagatgttttaccgtaataattattattaaaaatatgcttctacttgaaaaaaaaaaaaaaa

SEQ ID NO: 313 - DNA, 3782 bp, Homo sapiens
ctctcaggcgcggcggcgcgcccgggggtgggtggctgaggcggcggcgggcccaaggcgtgaggcgccgcccgggtgtccccgcggcgcaggaggcggtggagcgcagagcgggcgagcgcgaaaaatcactaccaatataatggattttatatatcagattgctttattctggatatcatggtaacaatacagaaagtatacataatttcccatttctgcaagtagtcatgactgctgaagaaagaaaaacttaaagctacggcagaattattttatggaaattctgattttgtttttaatttttgataactttttactaaaggtatgaacacacaaagagcttattttgttaggcaaatacacattaataagaatgcctagaagaggactgattcttcacacccggacccactggttgctgttgggccttgctttgctctgcagtttggtattatttatgtacctcctggaatgtgccccccagactgatggaaatgcatctcttcctggtgttgttggggaaaattatggtaaagagtattatcaagccctcctacaggaacaagaagaacattatcagaccagggcaaccagtctgaaacgccaaattgcccaactaaaacaagaattacaagaaatgagtgagaagatgcggtcactgcaagaaagaaggaatgtaggggctaatggcataggctatcagagcaacaaagagcaagcacctagtgatcttttagagtttcttcattcccaaattgacaaagctgaagttagcataggggccaaactacccagtgagtatggggtcattccctttgaaagttttaccttaatgaaagtatttcaattggaaatgggtctcactcgccatcctgaagaaaagccagttagaaaagacaaacgagatgaattggtggaagttattgaagcgggcttggaggtcattaataatcctgatgaagatgatgaacaagaagatgaggagggtccccttggagagaaactgatatttaatgaaaatgacttcgtagaaggttattatcgcactgagagagataagggcacacagtatgaactcttttttaagaaagcagaccttacggaatatagacatgtgaccctcttccgcccttttggacctctcatgaaagtgaagagtgagatgattgacatcactagatcaattattaatatcattgtgccacttgctgaaagaactgaagcatttgtacaatttatgcagaacttcagggatgtttgtattcatcaagacaagaagattcatctcacagtggtgtattttggtaaagaaggactgtctaaagtcaagtctatcctagaatctgtcaccagtgagtctaattttcacaattacaccttggtctcattgaatgaagaatttaatcgtggacgaggactaaatgtgggtgcccgagcttgggacaagggagaggtcttgatgtttttctgtgatgttgatatctatttctcagccgaattccttaacagctgccggttaaatgctgagccaggtaagaaggtgttttaccctgtggtgttcagtctttacaatcctgccattgtttatgccaaccaggaagtgccaccacctgtggagcagcagctggttcacaaaaaggattctggcttttggcgagattttggctttggaatgacttgtcagtatcgttcagatttcctgaccattggtggatttgacatggaagtgaaaggttggggtggagaagatgttcatctttatcgaaaatacttacatggtgacctcattgtgattcggactccggttcctggtcttttccacctctggcatgaaaagcgctgtgctgatgagctgacccccgagcagtaccgcatgtgcatccagtctaaagccatgaatgaggcctctcactcccacctgggaatgctggtcttcagggaggaaatagagacgcatcttcataaacaggcatacaggacaaacagtgaagctgttggttgaaatcataattaatgcgttactgtatgaaccacaaaacagcactatttatttagccttacttctacttccagatgcagtgcctcttttggagaagacatgtttatttttcatgttctttctgacattactttagcaattcaacttgatgtgagaagaaaaaacaaatgtttcaacacaaaatctctgttttgtgagaatactgcactatggaataattgacaaattgaaatctcatatttgtcccaaaagttgttttgagttagttctacctggtgcccatgttctgattgtgtgtgggattgcatggtgtcctgattgcatctaggtggagcggatggaatgtgctgggccactgttgggtggagagcagcacattcttacagaggagatggagcgttatgagcatagtatgtggataggtatcttcacctgcccgcccctgagtcagcctccttgacttgatagcttgaagaatccttttccactgaaatagaggataattaattgacacatctgaaatccccaatcaatcaatcaagagaaaggtagaactaaaaactccttaacttactgttgcttacacccctgaaagtctgtttttaagcaaatgggtaatagtagaaaataggttagaatctatggcttgattaaaaatatgttattacattatcatgttcaggattaggattagtagtcagttgctgtaaactattttgaacaaacagaaaagaacacggaaacatttttaacagagcatttaattatgttggaatacaggatcctagctctgtctgggaacattagtttatttgagccagctctatcagggtcttcccatggtggttcagaatagatgagcatagcatggttttgtttgtttttgctttcaattttctaatttggcatggatccatatgtatttactatcctttttctaatatattaatatatgctacatttgtatttgcattactataatactttgagttgaaaaagagtttcattgtggagagaaaaagcaaatggtatgccacaagatcactctgatttgagaaaagggaggaggggaagatagtctgaatggaaatctgaaatacggaatgttttagagaaatatgtcacttgcatatagaatgttttaattgaggtataaattaatgagacaaagtgaaaaagaaattatattcagataggactgcactacattatttgtcacacatggatctgttaccatcaggtcaattcctagtatgcataaattttttaacccttttaaaagagacctatgttgaaaacccctgaaaattcactgaagaaaaatcattactctttttctcagtaaatcatatcatctgaaatattacaaatttcaaatttctaggtgctatattaattcaatattacaataactcttacctaattattcttacaagttttaagttgtggtagtttagtgatttttttaaaagatgtgtgaaatgttctctgcaaaataattcaggccactgtctccttttatatattattataattatttattatgaagaccagtgaattacgatatttaaagtgagagaacttaattatttgcaaaggtaagttacagcttgttttttgagagaatcaaatgagtttacttttgttcctgttgtttttaactagctttaagtttaaagatggaagctaagcaatggaaatgctatacgtttttgacatttattaaatggtaccaataaagtattttattaccaaaagttaaatgaaaaaaaaaaaaaaa

SEQ ID NO: 314 - DNA, 3714 bp, Homo sapiens
ttatcagagacattgagaggcaaattcggaaaaaagaaaacattcgtcttttgggagaacagattattttgactgagcaacttgaagcagaaagagagaagatgttattggcaaaaggatctcaaaaatcatgacttgaatgtgaaatatctgttggacagacaacacgagtttgtgtgtgtgtgttgatggagagtagcttagtagtatcttcatctttttttttggtcactgtccttttaaacttgatcaaataaaggacagtgggtcatataagttactgctttcagggtcccttatatctgaataaaggagtgtgggcagacactttttggaagagtctgtctgggtgatcctggtagaagccccattagggtcactgtccagtgcttagggttgttactgagaagcactgccgagcttgtgagaaggaagggatggatagtagcatccacctgagtagtctgatcagtcggcatgatgacgaagccacgagaacatcgacctcagaaggactggaggaaggtgaagtggagggagagacgctcctgatcgtcgaatccgaggatcaggcatcagtggacttatcgcacgaccagagtggggattccctcaacagtgatgaaggagacgtgtcttggatggaggagcagctgtcctacttctgtgacaagtgccaaaaatggataccagccagtcagctgagggaacagctcagttaccttaagggtgataatttttttaggtttacttgttcggattgctcagcagatggcaaggagcagtatgaaaggctgaagctgacatggcagcaagtcgtcatgttggcaatgtacaacttgtctctggaaggaagtggacgtcaaggttatttcaggtggaaagaagatatctgtgcttttattgagaaacattggacttttttactagggaataggaaaaagacgtctacctggtggagcaccgtggcaggttgcctcagcgtgggaagtcccatgtacttccgttcaggtgctcaggaatttggagagccaggatggtggaaacttgttcataacaagcccccaacgatgaaacctgaaggagagaagttgtctgcctctactttgaaaataaaagcagcctcaaaaccaactttagatcccatcattactgttgagggacttagaaaacgagcaagtcggaatcctgtggaatctgccatggaattaaaagagaaaaggtctcgaactcaggaagcaaaagacattagaagagcccagaaggaggccgctggctttcttgacaggagcacatcttctacccctgtaaaattcataagccgaggccgcaggccagatgtgattctggaaaaaggcgaagtgattgacttttcctccttgagctcctctgaccgcaccccgctgacaagcccatctccttctccttctctggatttctctgcccctggtacacctgcctctcattctgccacacctagcttgctttcagaagcagatctgattccagatgtgatgcccccacaagccttgtttcatgatgacgatgagatggaaggcgatggagtcatagacccagggatggagtacgtcccaccccctgctgggtcagtagcttctgggccagtggttgggggcagaaagaaggtcagaggccctgaacagataaagcaggaggtagagagtgaggaggaaaaacccgacaggatggatattgacagtgaagacacagattcaaacacatctttgcaaacaagggctagagaaaagaggaagcctcagctggagaaggacacaaagccgaaagagcccaggtatactcccgtgagcatctacgaggaaaagctgctgctcaagaggctggaagcttgtcccggtgctgttgccatgactccggaagctcggagactgaaacgcaaactgattgtcagacaagcgaaaagggataggggattaccactttttgacttggatcaagttgttaatgctgctcttttgttagttgacgggatttatggagccaaagaaggaggaatttccagacttccagctggacaagccacgtacagaaccacctgtcaggacttcagaatccttgaccgataccagacttccttgccgtccaggaagggatttcgacaccagaccaccaagtttttgtatcgcttggtaggatcagaagatatggctgtggaccagagtattgtcagcccttatacctctcggatcttgaaaccttatatcaggcgtgattatgaaacaaagccacccaaactgcagctcctgtcacagattcgttcccacctgcacaggagcgaccctcactggacgccggagcccgacgcacctctcgattactgttatgtgcggccaaatcacatcccaacgatcaactccatgtgtcaggagtttttttggcctggcattgacctgtctgagtgtctgcagtacccagacttcagtgttgttgttctttataaaaaagtcatcattgcctttggcttcatggttcctgatgtgaaatacaatgaagcttacatttcatttctgttcgtccaccctgaatggagaagagcagggattgcaactttcatgatctatcatctgattcagacctgcatgggcaaggacgtaacccttcacgtctcagcaagcaaccccgctatgctactgtaccagaagtttggattcaagactgaagaatatgtattagatttctatgataaatattacccattggagagtacagagtgtaaacacgcattctttctgaggctccggcgctgatgcgaatacagctcacagagaaacgcatgtgctattggagaacaggtctttgtggagatctaaaggcagtgattgatttcacagggagctctaatctctgtgattacatggtccttcaaactcccaaccaaagtgagaaaagcggcatgcagtgaaatgagcagtgagcagccctttagcaaaatcgccctccagtccttcctggagatgccttcagccagcatcccagactccacagttatttatgaatgatgtcgtgattctccctccacctgacagtttgtaagagtgaaagagcatctaacctgatgctcttggagagagataacctgtctgtcataacttaaaggatgagaaaatgtggtgtagctattaaagattcatgcagtcccaaaaggcactgtcctgggatgatgagagattataaggtgatttcataaaaggaatccaaccctgtgcccggccattgatgtgttgtcattgaatccaggaggatttctagggcactgaagttttgttgtttcttttgctgactttggttacagtcagaaaaaataaactagatgtttgtgtctacatgttctacctgttgtacctattagcatcttcctgcagggacttgggcccatggcctgggaggttggtttgggattggggttgttgggcagcctgccattcacctggcctatcctggcccttctcatgcccaagacagttgtttcacaggagtggaagtgtgggtgatgcaagtagaaccctctagatgtaccctgtgtggtctgcaggactggactgtttgctgtgtttgtggatgttggcgatagactgtcaattaggttgtttgtgatccaacaagaacatttccaaaagtatctaggtgttctcaaataaaaagctttctttgcacaacccatggccagagcgtcaa

SEQ ID NO: 315 - DNA, 4617 bp, Homo sapiens
gtccttatttgcacccgccccccgcccgcgtcggtctggggcttttgacttctccccgaacacatttcccctcccgtcgctgggtccctgcgatcgcccccagctggtggggctcgcggagctcaggggagcggggtcctctgcgccgctgcagcgcgagttaataaacagttaagtttggaagactctgcagacacgttgagggggagttaccaagcccaggcagcaaaaacatcctggcacattcctggggagtcctcagctgccagcatctgattagaaccatatctctcgccgggagtggccgcgcggctccgaagctcccggccggcggctatttaagcgaggcccgccgcatccgctgcgctgtagcctggaggctccgggcgcggggaagtcatgctcgcttcacggaggcaatagctagccggtgtctgtgggaggttatgtttatttgagacttctccatcgggatcgcctggtgtcaccaagtgtccactggtactgaggtttgctgcctgccttcttgccatgtctaacgaagtagaaacaagtgcaaccaatggtcagcccgaccaacaggccgcaccaaaagcaccctcaaagaaggaaaaaaagaaaggccctgaaaagacagatgaatatctcttagcaaggttcaaaggcgatggtgtaaaatataaggccaagctgattggcattgatgatgtgccagatgcaagaggggataaaatgagccaagactctatgatgaaactaaagggaatggcggcagctggtcggtctcagggacaacacaaacaaaggatctgggtcaacatttccctttctgggataaaaataattgatgagaaaactggggtaatagagcatgaacatccagtaaataagatttctttcattgcccgtgatgtgacagacaaccgggcatttggttacgtgtgtggaggagaaggccagcatcagttttttgccataaaaaccgggcaacaggctgaaccattagttgttgatcttaaagacctttttcaagttatctataatgtaaagaaaaaggaagaagaaaagaaaaagatagaggaagccagcaaagcagttgagaatgggagtgaggccctaatgattctagatgaccaaactaacaaactgaaatcgggtgttgaccagatggatttgtttggggacatgtctacacctcctgacctaaatagtccaacagaaagcaaagatatcctgttagtggatctaaactctgaaatcgacaccaatcagaattctttaagagaaaatccattcttaacaaacggcatcacctcctgttctcttcctcgaccaacgcctcaggcatccttcttgcctgaaaatgccttttctgccaatctcaacttctttcccacccctaatcctgatcctttccgtgacgatcctttcacacagccagaccaatcgacaccttcttcgtttgattctctcaaatctccagatcagaagaaagagaattcgagtagctcgtctactccgctgagtaatgggcccctgaatggtgatgttgactactttggtcagcaatttgaccagatctctaaccggactggcaaacaggaagctcaggcaggcccatggcccttttcaagttcgcaaacccagccagcagtgagaactcaaaatggggtatctgaaagagaacagaacggcttctctgtcaaatcctccccgaacccttttgtgggaagccctcccaaaggactgtccatacagaatggcgtaaagcaggacttggaaagctctgtccagtcctcaccacatgactccatagccattatcccacctccacaaagtaccaaaccaggaagaggcagaaggactgctaagtcttcagccaatgacttgcttgcatcagacatctttgctcctcccgtctcagaaccttcaggccaggcgtcacccacaggacaacctacagccctgcagcccaaccctctggatctcttcaaaacaagtgctcctgccccagtggggcccctggtgggtctaggtggtgtaactgtcacactccctcaggcaggaccatggaacacagcatctttggtcttcaatcagtccccttcaatggctccgggagccatgatgggtggtcaaccttcaggttttagtcagcccgtcatttttggtacaagtccagctgtttcaggttggaaccagccttcaccctttgcagcctcaactccccctccagtgcctgttgtctggggcccttctgcatctgtggcacccaatgcttggtcaacaacaagccctttggggaatccttttcagagcaatatttttccagctcctgctgtgtccactcagcccccatccatgcactcctctctcctggtcactcctcctcagccacctcccagagctggccctcccaaggacatctccagtgatgccttcactgccttagacccacttggggataaagagatcaaggatgtgaaagaaatgtttaaggatttccaactgcggcagccacctgctgtgcccgcgcggaagggagagcagacttcttctgggactttgagtgcctttgccagttatttcaacagcaaggttggcattcctcaggagaatgcagaccatgatgactttgatgctaatcaactattgaacaagatcaatgaaccaccaaagccagctcccagacaagtttccctgccagttaccaaatctactgacaatgcatttgagaaccctttctttaaagattcttttggttcatcacaagcctctgtggcttcttctcaacctgtatcttctgagatgtatagggatccatttggaaatccttttgcctaaattctgaacttggtctgcagaccatccagaggaataaaaaggttggccttagtagtcaaaaacaaagctgatagccagacacgttctgatttctgcccttgttccagctttgacgtattatctgttgccttatttctcattgcctcttctacttgtaaaatgcttttcactttctgtctaggttaaagctaaactgaatctatggctttaaataaattaagatcctaaactctctagcttaagtgtaaatgaagtacagtagtttccctactgaaccctgcctcttgtgtccctggaaccttctagaacacctgccttctaccctctggttgggagatgcagccaccacatcccttcatatcatactgttttgaataaattttcaaatccttattgttcagagttgtttgggggttctgtttcagagcataaaacctaaaggttatagtagaacaaggcaccttcttaaaagaaatcttgcttcagaccatcagttacagagaatttctaaagtaaaattgaagcaactacaacttctccttagacactttggaatctaaccacttaaggacctttttaaagagatagcttctcttctttctgaagatcaatttctcccaaggccaagattgtccttttctcccatttcttgctagctattgcaaatgagggaagaacattattcatctctcctccccttttttttctgattcttttttcagtcagttttgctcctgggttcaagtagtattaccaccctttcacaagcaacagactctcacagggcaaaaaaaaaaaaaaatctaatgattcacagacagatctggagcctctcttcattctcagtaattgctagtcccaagaactagaattgcaaatgggcacaacctatatccttcctgtggaagaggaggccactctcttgagctgaagttccagaagagcagttaatgttcaagagaaattgaactcaactcagcaacaaaggactctattttgaagagcaacatatcacaaagctaaatgtgattgtgccaaacacattaggtgcttatttggggtcatgctaggcctttatcaagtaactggaaaacttttcttgcagccacaatctcaatgtcgttagtaggaagataagaggggagaaaaagctgtagaacaaatgtttggggttaccattgaaaatctaatgtctgcaatatttttctcctcacaacttggaaacgttcccagttcattttcagtcctgttgtgagcacagttctgaagggtttattattgtcaaaataagttttgttttgttttgtttatgttgggtttttaatgttgtctcttgacccttaatgctcaggttcttgtgggagttaatcagccacatccaatgttaccttgagggggaagaagagggtgatgctcagaagctaaacaagacaggggccacatgaccctctattgattagccccaagtagaaagtcctgtggttttatgtttaatggtaatagttgatcatatatggcataattttctatcagcttcctactcagtcactataaacacagacttgaaatagtactttaaatgtccaaatacctaaatgtgctaaactggaggtaactatttctaggtagttgaatttttgaaagtcatgatcagccacacaactgttttgtacatacttattttctcatgcacttttctgtatgcaaataaagctataaatttactcatttcaataaactggagtggcagaatatcaaaaaaaaaaaaaaaaa

SEQ ID NO: 316 - DNA, 2886 bp, Homo sapiens
agaaagggtttgactggaggaacctctggagcagctgttggctggctcctctggctgatggcatgttgaggtacatgggccagcggcagcgagggcatccaatccagaggggtccactctagaggccaggccaccagcaccatgggccagtgtgtcaccaagtgtaagaatccctcatcgaccctgggcagcaaaaatggagaccgtgagcccagcaacaagtcacatagcaggaggggtgcaggccaccgtgaggagcaggtaccaccctgtggcaagccaggtggagatatcctcgtcaacgggaccaagaaggccgaggctgccactgaggcctgccagctgccaacgtcctcgggagatgctgggagggagtccaagtccaatgccgaggagtcttccttgcaaagattggaagaactgttcaggcgctacaaggatgagcgggaagatgcaattttggaggaaggcatggagcgcttttgcaatgacctgtgtgttgaccccacagaatttcgagtgctgctcttggcttggaagttccaggctgcaaccatgtgcaaattcaccaggaaggagttttttgatggctgcaaagcaataagtgcagacagcattgacggaatctgtgcacggttccctagcctcttaacagaagccaaacaagaggataaattcaaggatctctaccggtttacatttcagtttggcctggactctgaagaagggcagcggtcactgcatcgggaaatagccattgccctgtggaaactagtctttacccagaacaatcctccggtattggaccaatggctaaacttcctaacagagaacccctcggggatcaagggcatctcccgggacacttggaacatgttccttaacttcactcaggtgattggccctgacctcagcaactacagtgaagatgaggcctggccaagtctctttgacacctttgtggagtgggaaatggagcgaaggaaaagagaaggggaagggagaggtgcactcagctcagggcctgagggcttgtgtcccgaggagcagacttagtggctctgtcccaggagcagcagcaaggatctgccagctgccctgcagccaactgaggaattggaccattttggaaattactgaagatccggatattttctactttacacctttctctgccttgtatctgaaagggctctaaaatgctgtatcatgttttaggcactttcttcatttttttggttattttggttatttcctttttggggggatctcccagaatatttgaacctggttacatgttgtgtatctttttttgaagccttcagatagaataagcctgccatttcttgcacaaatttaggttttttttttgtttttttttgtttttttttttttttttttggtaggggagggcatagagcagggcggggggatgggactgttaggttgaattaacattacaaaatgatacagtgccagatctcagtttcgcatattgtttttcagggcaggtctgtactgtgtgtagtgctgtttacatagatgaatttaggttgtaataattatttttaaagatttacacagatttgaatagcagtgttaactgttaaccacattgcattaattcccaggcgatttagagctcttggagagccaaggccagccaagagcatttgtagtctggtgacaacccccttttaagctaatttatccagaaccctgatttccctcacttcttgctcattccttctttgacctattgcatttcatgttgagtttttccatcaacatgctgcacctgtcagtcaagtgagcattttttaagaacacattgtactgagaaccacttaagcattgaatgcggagaaagcagtgctacctcagttttgctggaagtagacttctttgatagttttctttctttgatgaagtttctgtattttcatgttgtaagtggaaatacttttttttgtttgtttgtttcatttgccttggagccaaagtttctgttcctggtggtcgggaaactgcctgccggccaactgacttgaaggaaaactgtggtatggagctctgcttgaatttttttttttttaatatttttatttttttctttgaatatcatcagcttacttgtctggcaagggcagaagcctggggttggcctgaactctgccaaacaaatatcaaagtgtatttaatagttaaatttgtgccctttcccttcttgctgcacccatgttgtcacttaacccccaggagttatttattatctttttgttaaagtcaggctcatttggggtaatgtgatgactgtttaggtttacatgaccctcctctcctttccctacccccaaatatgtatatatacatatataaaatatgtatatattttacctatataaaatatatatatatacacatatatgtatctatattcctttgtttctttgcctgcttatactggccataaaagagggagctgccttcaatgtataaagtataagaagagtgccagggaatgccataatggaggcttttggatctgaatttggaccatttcactaaagagaacatgagtttgctcagccctttcctcacaagagggagggccccggttccccagacttctccacgcgctggctccataaaggccagctttggccaggctgccacaggggcctgaggagctcactctgggcctacctggtttcagttagagggtcctcctgttatttttccatttaaaaagtatgtcctcagaaaactgtactggaaggatgggtggcaggaacttgtatagttcagcttccaacactttggaacagattaaaaagggaatcttttaaataaaaacgtataaaaataaaaaaaaaaaaaaaaaaa

SEQ ID NO: 317 - DNA, 3991 bp, Homo sapiens
agtcgcgcgggcagggctccgggcgcgagctgggctccttctgcaccacattcagcggctgccaagaggagccgacgggcgctcgcaggctcagcgcgcgctgcccgcggcaggacccggccgcctccgccgccgccgccgcccctaagcctcccgaagccatggccgggctcggccaccccgccgccttcggccgggccacccacgccgtggtgcgggcgctacccgagtcgctcggccagcacgcgctgagaagcgccaagggcgaggaggtggacgtcgcccgcgcggaacggcagcaccagctctacgtgggcgtgctgggcagcaagctggggctgcaggtggtggagctgccggccgacgagagccttccggactgcgtcttcgtggaggacgtggccgtggtgtgcgaggagacggccctcatcacccgacccggggcgccgagccggaggaaggaggttgacatgatgaaagaagcattagaaaaacttcagctcaatatagtagagatgaaagatgaaaatgcaactttagatggcggagatgttttattcacaggcagagaattttttgtgggcctttccaaaaggacaaatcaacgaggtgctgaaatcttggctgatacttttaaggactatgcagtctccacagtgccagtggcagatgggttgcatttgaagagtttctgcagcatggctgggcctaacctgatcgcaattgggtctagtgaatctgcacagaaggcccttaagatcatgcaacagatgagtgaccaccgctacgacaaactcactgtgcctgatgacatagcagcaaactgtatatatctaaatatccccaacaaagggcacgtcttgctgcaccgaaccccggaagagtatccagaaagtgcaaaggtttatgagaaactgaaggaccatatgctgatccccgtgagcatgtctgaactggaaaaggtggatgggctgctcacctgctgctcagttttaattaacaagaaagtagactcctgagctgcagagtcccccccggtagccggcaagaccgcacaggcaaggccgatgactctgtgcccactcctgttgttttccttgacaatctactgtgccactgtgctactaactcttgtttacaaaatttgattctaagttgaattgcttcattcaacacccccaccctccctcccctcgaggtggtacctaagctgtggatttgctaaatgaattaagcaacctagaagatacagagctaatgaattatcaaaatgtgattaatcccagtaaggaaacactcatttagtgtctgtatttttggtgtgaaaattatttagttgccagtatattctgaagaatgtcttcttgatcagtcagataagcttgctttttttttttttttttttcatgaatcatgtttggttcctgtgaaagtccctggtccagggatcctcctcctttctcttttacttctgaattctgaaattcagttagttacttttgcctttcgctcttctatcacagccaccttgaccttgggtaaaacccaaggtctttccttctggctaccttcctgcaggtccaccctgtctgccattggtctcctctgcctctgactacatctgccaccaacaaccctcccctcacccctgccaggggcagacaggcttctcagcagaactgtgactgaaatcagagctgctgtctggggcagtgttaactacacagaggcacatcctgacagggtttgccccagagatctaaattccagaaggagggcaccacacctaggaaggtaaatccagtatcagaaggttgctaaaagattaaagatcaagaagcttggaaacatcccatgggtacaatgtcttagaaagtctttaagtcacataccatgaatttttgcttcattactgaccatatatgaccttggaggaactcttttttttttttccttctactcatttctgtttccacctaccctgactcaccgtatttccagtcttctacccctgcagttatcctagtccagcaaagtcatttctttcaaaagagacatcatgtctgaaaataattactggtagtctaatatgagccagagtaaacagctcctcatggtcaatgaacatgttcaggaagcgatcaccttgatgcttgaacccaaccccagacagtggacaattctactttgaaatatccgtgaatatttactgtgggatccaatttaaacttctttcttctctagcctttaaattacacaactttgaactgacacggatctcttacaaagaacaatgcggcactgaaggaagagatgattcctttactcaaacctgcaggaatcagcctattaacaggcaggggaaacggtactttccaatgaatggtaactgatccaggcacattatcacacttcctagtcatctccacctttcctgtattgcctgtggcttgttgtttaagattaagaatcaaagagattaagaagtatcacttcaaatcttgctctgctcacttctatgtttgcagtcaaattattccttatgttggtgacctaaagagaattactttcattcatttcatttcccccgtagcagatggaaggagaaacctctgagaaaatgaaaacatccttaaccactatctttcccttttatttgattattttatgtcagaaatttgcaaaagtttttttctcctccttctcttccttgttgcttaactttttaattcatgccatatgcagatatccaattatgtgcatcctgtgaataaaccacgtcttggtcactgtcatattttgaaccatctcatcagagatgaataatatctttttaccagagagagaacgaatgttagccacatgcccaagttaacaaagaaaaaatgttctcaaggttgtccttttgggttaaatctggcccttccttggcaaaagcaaaaattctccctgtgagagctcaacatctcaaatacaaccacaggaaaaatggcccaatctgccagtttaggcttaccagcatataatttttaatatctttacttctatcatcccaaatcaaagaactcttctctattatgtttaatcaattgcaagcaaatagatttttctttgtaacaatttgttctgcagaaggctgtttttcacttttcctttcttttgcttctttctgtctttccttctcttttgtctggagaaatcacttagactctgtgtgcctcttctacattgcattctgctctgctatgttacctgctaggctggcttctttggactccctatatgattgatgatgtgaaaacctaaattacttgcagcatagtattacttctttgatgttctcattagcataatgttatttttgaaaaggaaagatactatcacataagttttcctcatctgttgtgatatacaccaatggataaactaacggaaactgctttttgacattaaaagacaggagaaattatatttaactaagtaaaagttaagtcagaattacttgggtgatgtgattcaatttagttaaaggatgatatagagaaaatacattatttagcattatttcttcagctataatgaattgctatagaaatcaggcagatctttctaatgtgtattgattggtcttttcagctactctgaacagattactaaggccatctcctcatctctaagggagaaaaatagtctgtagatgaataatgtaaggtaaagagttgcatgtcagtctttgtaattatttacactttaactttctccagaactcagacatgatttcaacatggtgttagatttgtgcattttattttcctgaccacctcattccagccaatgtatggttatccactctgtgtgccaaaaccaatcatgcctttcacggccctttagttcagagaagttctgcactgatttttagtctcttgatgtctcaatcttacatgtataccaatcacaatggaataaagtgttgagttgtactgtgaaaaaa

SEQ ID NO: 318 - DNA, 4720 bp, Homo sapiens
gctacgggaagtgacgagagccgggtggacccagggtggggaactacctcttcctctccacgcggttgagaagaccggtcggcctgggcaacctgcgctgaagatgccgggaaaactccgtagtgacgctggtttggaatcagacaccgcaatgaaaaaaggggagacactgcgaaagcaaaccgaggagaaagagaaaaaagagaagccaaaatctgataagactgaagagatagcagaagaggaagaaactgttttccccaaagctaaacaagttaaaaagaaagcagagccttctgaagttgacatgaattctcctaaatccaaaaaggcaaaaaagaaagaggagccatctcaaaatgacatttctcctaaaaccaaaagtttgagaaagaaaaaggagcccattgaaaagaaagtggtttcttctaaaaccaaaaaagtgacaaaaaatgaggagccttctgaggaagaaatagatgctcctaagcccaagaagatgaagaaagaaaaggaaatgaatggagaaactagagagaaaagccccaaactgaagaatggatttcctcatcctgaaccggactgtaaccccagtgaagctgccagtgaagaaagtaacagtgagatagagcaggaaatacctgtggaacaaaaagaaggcgctttctctaattttcccatatctgaagaaactattaaacttctcaaaggccgaggagtgaccttcctatttcctatacaagcaaagacattccatcatgtttacagcgggaaggacttaattgcacaggcacggacaggaactgggaagacattctcctttgccatccctttgattgagaaacttcatggggaactgcaagacaggaagagaggccgtgcccctcaggtactggttcttgcacctacaagagagttggcaaatcaagtaagcaaagacttcagtgacatcacaaaaaagctgtcagtggcttgtttttatggtggaactccctatggaggtcaatttgaacgcatgaggaatgggattgatatcctggttggaacaccaggtcgtatcaaagaccacatacagaatggcaaactagatctcaccaaacttaagcatgttgtcctggatgaagtggaccagatgttggatatgggatttgctgatcaagtggaagagattttaagtgtggcatacaagaaagattctgaagacaatccccaaacattgcttttttctgcaacttgccctcattgggtatttaatgttgccaagaaatacatgaaatctacatatgaacaggtggacctgattggtaaaaagactcagaaaacggcaataactgtggagcatctggctattaagtgccactggactcagagggcagcagttattggggatgtcatccgagtatatagtggtcatcaaggacgcactatcatcttttgtgaaaccaagaaagaagcccaggagctgtcccagaattcagctataaagcaggatgctcagtccttgcatggagacattccacagaagcaaagggaaatcaccctgaaaggttttagaaatggtagttttggagttttggtggcaaccaatgttgctgcacgtgggttagacatccctgaggttgatttggttatacaaagctctccaccaaaggatgtagagtcctacattcatcgatccgggcggacaggcagagctggaaggacgggggtgtgcatctgcttttatcagcacaaggaagaatatcagttagtacaagtggagcaaaaagcgggaattaagttcaaacgaataggtgttccttctgcaacagaaataataaaagcttccagcaaagatgccatcaggcttttggattccgtgcctcccactgccattagtcacttcaaacaatcagctgagaagctgatagaggagaagggagctgtggaagctctggcagcagcactggcccatatttcaggtgccacgtccgtagaccagcgctccttgatcaactcaaatgtgggttttgtgaccatgatcttgcagtgctcaattgaaatgccaaatattagttatgcttggaaagaacttaaagagcagctgggcgaggagattgattccaaagtgaagggaatggtttttctcaaaggaaagctgggtgtttgctttgatgtacctaccgcatcagtaacagaaatacaggagaaatggcatgattcacgacgctggcagctctctgtggccacagagcaaccagaactggaaggaccacgggaaggatatggaggcttcaggggacagcgggaaggcagtcgaggcttcaggggacagcgggacggaaacagaagattcagaggacagcgggaaggcagtagaggcccgagaggacagcgatcaggaggtggcaacaaaagtaacagatcccaaaacaaaggccagaagcggagtttcagtaaagcatttggtcaataattagaaatagaagatttatatagcaaaaagagaatgatgtttggcaatatagaactgaacattatttttcatgcaaagttaaaagcacattgtgcctccttttgaccacttgccaagtccctgtctctttcagacacagacaagcttcatttaaattatttcatctgatcattatcatttataactttattgttacttcttcatcagtttttccttttgaaaggtgtatgaattcattacatttttattctaatgtattatctgtagattagaagataaaatcaagcatgtatctgcctatactttgtgagttcacctgtctttatactcaaaagtgtcccttaatagtgtccttccctgaaataaatacctaagggagtgtaacagtctctggaggaccactttgagcctttggaagttaaggtttcctcagccacctgccgaacagtttctcatgtggtcctattatttgtctactgagacttaatactgagcaatgttttgaaacaagatttcaaactaatctgggttgtaatacagtttataccagtgtatgctctagacttggaagatgtagtatgtttgatgtggattacctatacttatgttcgttttgatacatttttagcttctcattataaggtgattcatgctttagtgaattcttcatagatagtatatataaaagtacattttaatagaaagccagggttttaaggaatttcacatgtataaggtggctccatagctttatttgtaagtaggctggataaatggtgcttaaatggtaatgtactccacttcttcctattggaagattaacattatttaccaagaaggacttaagggagtagggggcgcagattagcattgctcaagagtatgtaaaaaaaaaaaaaaaaaaaaagaaccaaaccactggaaataatcaaatgcaaaaaggtaacaaattcataactggaaagcaaagagaagaacaagtatgatttggatgataaagcattgttttaatggtgaaaacttcacagatcactaatgtttctagaggttaacttcaagtgggcaagctggggtttttaggtagtcagtggcctagttcctaaagccacagtataggatctgttaaactgaatgtctgttgaaagtttgttttagctgcttggaggcttccttttaagacaaactgtatgtgattaagttgttttgagggaactgaagaacctgatgtagcccctggccagataactgcctgatttctcagatattatttctctgggaaacattctacatagcacaggagcttaagagtggcattatcttctcgccttaatttccagagattatttctgtactgagaatcctggaactactatgctaggaaatttaaagctgcatggtctgtcttgttttcatttaattattgtgaatacctagaatctttcttggtcctgatttctcttgcttaatccagtctttatctctaactgccccttatttgatcaccatgtactaggagctctgatagccagctcagctcctaatccttgaggcaacattctttttctatttgaacttcagttctgtccttgaatcccgactagatatttcttgccctctggtctcagaattctcttggcttttattccttgatccacttgccagttttatcactttacccttgttcctcatggcttcccatcaagccatgggtattaggtgacagtgtaatttattagattctggttttgcccaaatactgggcatgctttaataataactgaaccatttcattatttggataggcatgggtaccttatcaagcagattaaaaggatatggtacccgtcctttagaaaagaacagctaaaaccttgttgtggattatggatttagcctaaagaaaaataatctggcataaattaagagtaagagagaagattaatagaaatttcacttcacataacttaaaacatggctatttcaataaaggactaaagtttctcctggatcccagaattcaacctgtatttataaatgtataatgtatttagctactttttggtttaaatgaacttgttgggttagcttggtaaatgttataatttttactattttctacaaagaaaatattttctaatttaagttggagctatctgtgcagcagtttctctacagttgtgcataaatgtttttactataaaatgagctaatgtataaaatactgctgtataccataataaagatagtaatacttgataaaaaaaa

SEQ ID NO: 319 - DNA, 2250 bp, Homo sapiens
gagacgctgtctgcttgctgccttaagacagctagctgaattgctgattaacttttaaaatacccagcttggtttatttttcttagaatctgttgctaagactggggacgctgttttcttttacaaagggaaatctaagttaatttcaaggcattcgaaatggggaaagactattattgcattttgggaattgagaaaggagcttcagatgaagatattaaaaaggcttaccgaaaacaagccctcaaatttcatccggacaagaacaaatctcctcaggcagaggaaaaatttaaagaggtcgcagaagcttatgaagtattgagtgatcctaaaaagagagaaatatatgatcagtttggggaggaagggttgaaaggaggagcaggaggtactgatggacaaggaggtaccttccggtacacctttcatggcgatcctcatgctacatttgctgcatttttcggagggtccaacccctttgaaattttctttggaagacgaatgggtggtggtagagattctgaagaaatggaaatagatggtgatccttttagtgcctttggtttcagcatgaatggatatccaagagacaggaattctgtggggccatcccgcctcaaacaagatcctccagttattcatgaacttagagtatcacttgaagagatatatagtggttgtaccaaacggatgaagatttctcgaaaaaggctaaacgctgatggaaggagttacagatctgaggacaaaattcttaccattgagattaaaaaagggtggaaagaaggcaccaaaattacttttccaagagaaggagatgaaacaccaaatagtattccagcagacattgtttttatcattaaagacaaagatcatccaaaatttaaaagggatggatcaaatataatttatactgctaaaattagtttacgagaggcattgtgtggctgctcaattaatgtaccaacactggatggaagaaacatacctatgtcagtaaatgatattgtgaaacccggaatgaggagaagaattattggatatgggctgccatttccaaaaaatcctgaccaacgtggtgaccttctaatagaatttgaggtgtccttcccagatactatatcttcttcatccaaagaagtacttaggaaacatcttcctgcctcatagaatgaagaactttgttacacatattttgataaggcactgaaaatataaaaggactggtagtttactgatgtagatgtgaattctgtataaagatgtgtaaattcttttgagggttcattaaattgcatgaatagagacgggtcaaataaataggcaaaagggatttttacagttagagataaaagagaaaaccattcactgtattttatttcatttctcctgattcagatatttttagtaatttgcttatatgtaaaagttgtttttgtggagtcagtggatatatttctaatgaagtgctagactatccaattacttaatttcttatacctttagataatcagtatgaaaagttcccatttataatggaaatgaaaattcttaactaaactatacatgtaatatgtatttctagaagagaataaaaacccaagtcagttattagatttaaatcaccttctgaaatgctgctatagggctggtatctgtaaaagaatatcctgatgcatctgtttcaccattttgatttttaaagtatgctgtagcatttcttaataacatcgttgtgatgttcttaaggcagatctttcttcataaaaaggaaagtaatggcaatttctctcctgtggaaatcccaattgcttgaattactgatattttagaatagactttttaaaatgccatatgtaattttatgcaagttgactatatatcttgtacttaataaattataggctcattttgttctctgctagtttaaagtaattcgtttaataatagatgtgtttttagaggaaatgctgttacttggaattaattttccagttatacagtcttctataacttactaataatattctatatgtactttatgtaatttccctaaaaagaatgaactaccactacactatggtgttaaaccaaaatatagggaaaataaacactaactgctgcttatggataatgttgcaactacttgttatgcatataaatattttactttttcacatgtatagattgcatttcttaggtgttttaattttttaaatatatttatgttttaaaaaaaaaaaaaaa

SEQ ID NO: 320 - DNA, 2118 bp, Homo sapiens
gcgttccagggcggctgctcacgggtggccgcagcccagtgctgggactcgcgcggctcctcctcttagccccccaccccttcctcctctttcctcctcctccttcctcctcctcctcctccttcttctcctccttctcggccgggaggaggcagggctggatccctcagccgccgccgctcctcctcctggcaggccggccgcggagtcagctgacgccggcgctccagcctcgcctccccgcgccgcgctctgcgctccccgaaagtggctgcaagccggccgcccactgtcagggttggggggacagagaaagtgatgtgcgccttctaaagcctcgcccagcgccgccgaagcagcttcacctctccaactttctcccaccgactgcttgtcttgaccctgccctccaccctccccagagccacttcgggtgcgcgctcttgggtaaagggggggtcaccggctgtctgggatggcttccaattttaatgacatagtgaagcaagggtacgtgaggatccggagcagacgcctcgggatttatcagcgatgctggttagtattcaagaaagcttcaagcaaaggtccaaaaagactggagaaattttctgatgaacgtgctgcatatttcaggtgttatcataaggttacagaactcaataatgtgaagaacgtagctcgattgccaaaaagcaccaagaaacatgccatagggatttatttcaatgacgatacctccaagacttttgcttgcgaatcagatcttgaggctgatgagtggtgcaaagtactccagatggagtgtgtaggaacacggatcaatgacatcagccttggagagcctgacttactggccactggggttgagagagaacagagtgagagattcaatgtgtatttgatgccatctcctaacttagatgtacatggcgaatgtgccttgcagattacatatgagtatatctgtctttgggacgtccagaatcccagagtcaaactcatctcttggccgctaagcgccctgcggcggtatggacgtgatactacgtggttcacttttgaggcagggaggatgtgtgagactggtgaagggctgtttatctttcagacccgagacggggaggccatctatcagaaagtccactctgctgccttggccatagccgagcagcacgagcgcttgctacagagtgtgaaaaactcgatgctccagatgaagatgagtgagcgggccgcctcgctgagcaccatggtgcccctgcctcgcagcgcctactggcagcacatcacacggcagcacagcacgggacagctctaccgcttgcaagatgtttccagccctctgaagcttcatcgaacagagacttttccagcctacagatctgagcactgacagtaactgccaagaattgttaacacacttgtgatgtgtcagccacagattcacccaggaggtcacagaatgacagcaagggaaatgacgaccaagagaagaagcttaaagtcctggctaattgtgtggtcattggaaaactctgcaatacaataattttctttattttctttttcttttttaaattcttagtgtaattgaaacgtgctctatagatattgactctgtgttccctcttttacagctggacagaaagaagtcaatgtcacgaaatgattttctattgtagatactttgtcccttgcacttctctgaatctgtccttttgtggattcttgtgattttccttccaagtgtttcagttgtatgacagtcagtattgacaataaaatggcttttaattatttgttatttgtttacaccctattcctcagttattattactgtggttctgattaactactggaaattatatttgattatatcaccaattagttaaatcagtgcttcgactcactcttatctgttctgttcaaaactatttgttcaaagaacccgttagtgttgtttacagggttacagtttctctcacatgctttcctcacccctttacccccctttttgaaagcctttattttgttcggagtctcttcataaaacatttgaaaataaaagatcattcttcacccataaaaaaaaaaaaaaaaaaaaaaaaaaaaaaa

SEQ ID NO: 321 - DNA, 7455 bp, Homo sapiens
cccgcctagcatggtgcggcggccgcgcgcgcggacatgggggagaagctggagctgagactgaagtcgcccgtgggggctgagcccgccgtctacccgtggccgctgccggtctacgataaacatcacgatgctgctcatgaaatcatcgagaccatccgatgggtctgtgaagaaatcccggatctcaagctcgctatggagaattacgttttaattgactatgacaccaaaagcttcgagagcatgcagaggctctgcgacaagtacaaccgtgccatcgacagcatccaccagctgtggaagggcaccacgcagcccatgaagctgaacacgcggccgtccactggactcctgcgccatatcctgcagcaggtctacaaccactcggtgaccgaccccgagaagctcaacaactacgagcccttctcccccgaggtgtacggggagacctccttcgacctggtggcccagatgattgatgagatcaagatgaccgacgacgacctgtttgtggacttggggagcggtgtgggccaggtcgtgctccaggttgctgctgccaccaactgcaaacatcactatggcgtcgagaaagcagacatcccggccaagtatgcggagaccatggaccgcgagttcaggaagtggatgaaatggtatggaaaaaagcatgcagaatacacattggagagaggcgatttcctctcagaagagtggagggagcgaatcgccaacacgagtgttatatttgtgaataattttgcctttggtcctgaggtggatcaccagctgaaggagcggtttgcaaacatgaaggaaggtggcagaatcgtgtcctcgaaaccctttgcacctctgaacttcagaataaacagtagaaacttgagtgacatcggcaccatcatgcgcgtggtggagctctcgcccctgaagggctcggtgtcgtggacggggaagccagtctcctactacctgcacactatcgaccgcaccatacttgaaaactatttttctagtctgaaaaacccaaaactcagggaggaacaggaggcagcccggcgccgccagcagcgcgagagcaagagcaacgcggccacgcccactaagggcccagagggcaaggtggccggccccgccgacgcccccatggactctggtgctgaggaagagaaggcgggagcagccaccgtgaagaagccgtctccctccaaagcccgcaagaagaagctaaacaagaaggggaggaagatggctggccgcaagcgcgggcgccccaagaagatgaacactgcgaaccccgagcggaagcccaagaagaaccaaactgcactggatgccctgcacgctcagaccgtgtctcagacggcggcctcctcaccccaggatgcctacagatcccctcacagcccgttctaccagctacctccgagcgtgcagcggcactcccccaacccgctgctggtggcgcccaccccgcccgcgctgcagaagcttctagagtccttcaagatccagtacctgcagttcctggcatacacaaagaccccccagtacaaggccagcctgcaggagctgctgggccaggagaaggagaagaacgcccagctcctgggtgcggctcagcagctcctcagccactgccaggcccagaaggaggagatcaggaggctgtttcagcaaaaattggatgagctgggtgtgaaggcgctgacctacaacgacctgattcaagcgcagaaggagatctccgcccataaccagcagctgcgggagcagtcggagcagctggagcaggacaaccgcgcgctccgcggccagagcttgcagctgctcaaggctcgctgcgaggagctgcagctggactgggccacgctgtcgctggagaagctgttgaaggagaagcaggccctgaagagccagatctcggagaagcagaggcactgcctggagctgcagatcagcattgtggagctagagaagagccagcggcagcaggagctcctgcagctcaagtcctgtgtgccgcctgacgacgccctgtccctgcacctgcgtgggaagggcgccctgggccgcgagctggagcctgacgccagccggctgcacctggagctggactgcaccaagttctcgctgcctcacttgagcagcatgagcccggagctctccatgaacggccaggctgctggctatgagctctgcggtgtgctgagccggccttcgtcgaagcagaacacgccccagtacctggcctcacccctggaccaggaggtggtgccctgtacccctagccacgtcggccggccgcgcctggagaagctgtctggcctagccgcacccgactacactaggctgtccccggccaagattgtgctgaggcggcacctgagccaggaccacacggtgcccggcaggccggctgccagtgagctgcattcgagagctgagcacaccaaggagaacggccttccctaccagagccccagcgtgcctggcagcatgaagctgagccctcaggacccgcggcccctgtcccctggggccttgcagcttgctggagagaagagcagtgagaagggcctgagagagcgcgcctacggcagcagcggggagctcatcaccagcctgcccatcagcatcccgctcagcaccgtgcagcccaacaagctcccggtcagcattcccctggccagcgtggtgctgcccagccgcgccgagagggcgaggagcacccccagtcccgtgctgcagccccgtgacccctcgtccacacttgaaaagcagattggtgctaatgcccacggtgctgggagcagaagccttgccctggcccccgcaggcttctcctacgctggctcggtggccatcagcggggccttggcgggcagcccggcctctctcacacctggagccgagccggccaccttggatgagtcctccagctctgggagcctttttgccaccgtggggtcccgcagctccacgccacagcaccccctgctgctggcacagccccggaactcgcttcctgcctctcccgcccaccagctctcctccagtccccggcttggtggggccgcccagggcccgttgcccgaggccagcaagggagacctgccctccgattccggcttctcagatcctgagagtgaagccaagaggaggattgtgttcaccatcaccactggtgcgggcagtgccaagcagtcgccctccagcaagcacagccccctgaccgccagcgcccgtggggactgtgtgccgagccacgggcaggacagtcgcaggcgcggccggcggaagcgagcatctgcggggacgcccagcttgagcgcaggcgtgtcccccaagcgccgagccctgccgtccgtcgctggccttttcacacagccttcggggtctcccctcaacctcaactccatggtcagtaacatcaaccagcccctggagattacagccatctcgtccccggagacctccctgaagagctcccctgtgccctaccaggaccacgaccagccccccgtgctcaagaaggagcggcctctgagccagaccaatggggcacactactccccactcacctcagacgaggagccaggctctgaggacgagcccagcagtgctcgaattgagagaaaaattgcaacaatctccttagaaagcaaatctcccccgaaaaccttggaaaatggtggtggcttggcgggaaggaagcccgcgcccgccggcgagccagtcaatagcagcaagtggaagtccaccttctcgcccatctccgacatcggcctggccaagtcggcggacagcccgctgcaggccagctccgccctcagccagaactccctgttcacgttccggcccgccctggaggagccctctgccgatgccaagctggccgctcaccccaggaaaggctttcccggctccctgtcgggggctgacggactcagcccgggcaccaaccctgccaacggctgcaccttcggcgggggcctggccgcggacctgagtttacacagcttcagtgatggtgcttctcttccccacaagggccccgaggcggccggcctgagctccccgctgagcttcccctcgcagcgcggcaaggagggctcggacgccaaccctttcctgagcaagaggcagctggacggcctggctgggctgaagggcgagggcagccgcggcaaggaggcaggggagggcggcctaccgctgtgcgggcccacggacaagaccccactgctgagcggcaaggccgccaaggcccgggaccgcgaggtcgacctcaagaatggccacaacctcttcatctctgcggcggccgtgcctcccggaagcctcctcagcggccccggcctggccccggcggcgtcctccgcaggcggcgcggcgtcctccgcccagacgcaccggtccttcctgggccccttcccgccgggaccgcagttcgcgctcggccccatgtccctgcaggccaacctcggctccgtggccggctcctccgtgctgcagtcgctgttcagctctgtgccggccgccgcaggcctggtgcacgtgtcgtccgctgccaccagactgaccaactcgcacgccatgggcagcttttccggggtggcaggcggcacagttggaggtaactaggatttctacctcaaccgcgagacctatgcaaggacggtgtggaccaactcgcgcccgcggcatggtgcccgccggcctgccgggctcccacccctggacggcagaggcaaggacggacgggagctccactgtgaatcggcggcacgcgccgcaggaggctgggactggtccagtttgtactgtcgatagttttagataaagtatttatcattttttaaaaagtataaacaattctgacttattttattccatctaagtggtaaaaggcaacttattgagaaatataaatatctatatatgagagctctatataaagacacgtgtctgcagggcgggcccgccagcggattcgccacagcctgccccggtgctatctcgtccccaggcccgcgcctgcctccacccgcttggtgctgactagacgctgacaacgccgaaccccgttctcggaaacgccgcccggccggctcccccgacgcgctgctcccgtaccaaaggcaggcccgtcgccaccacattcctcggaggcctccccgcggcctgagccccttcctgagcgccctggcgcctgccctgagctcttcacctttaccccggcactgtgaacccccagactgttcaccctccggggcgtgggttgcgcccttgcatgtgaaggggcctgcgcggtgacgcagctggccatgtgctgcgcgatggtgctgtgaggacggcgcgggcacgttgaacaagtgcatttacttttgtatttctcggctgtccatggctcgcagcatgccctgcgatgcggggcaggcctgtcgtgggtcccttggtgtttctgtacaggagagagtcacactaatgagtggcagtattttatagagatgtgatgagaatttataaatttcatagatttgacagcttttatttttagatggtataatgcacagtgaagaggaaagaaaagcgaggggaaaaaaccttatttattcaaacagtgcacaaaatggccccagcgtcagccccgaccctagacccctcagttgcagctcccagcagcccagacagagctgccggcgcccctgcctgccccacatcccttcctgtcagggccacgcctggcacccatcccttggagcctgtgctggttctcccagctgctgtgggtgtgctggggccagggtgcactgctgaaacctggcctctctggccctaggccccagggtgacgtcggccccccactctgcagccttggcgggtgcctgggactgggtgtggaaggagaggagctgaggccggggtgtagcaggcaggcagggccactccagtgcttctggagccctgagcagtcagggcctgggttgtctgagcagtggtggctctgtgccctccctggaggatgggatctgggagtctgagctccccgcatctggccctgggctgtgtggcacttgctgagcccaccttctcaagtgcttgctcctgtgagatggcatcggggagccccttccccaaggtgccacagatccaccctccagggagctgccagccctgtgttctggttcccaagggcaggatggacacacgtcacatccctaccacgtggcctccaaagggagccacggaggaaaggcttctgtggttgctaggtgggggagtcctgtgtgggagggcctgaagacccctgcttgtgcctggtgaggggggtgctgcctcccccagcccccaacaacctctcagacccccaccctccaacatagctgagttctgaagatggtgctccggacctgtcctcttaagtggtgcccagtgccctccccaccccacgttggtgctctcagctagaaggtgctgtgcctctgcctgagccccaagccccgagcctggccttcaggacaggcagcctgctctgtgtcgccacgggccggatacgccacagggttgatggcagagacggccgagtccctggtctagaacaagacacattctttaaacactgtattacttctgcctccctctaggtgacagtggcagtccgggtgccatcacgggtcctgcagatggccatgcagggctcctgcccacgcaggccaccgtatgttcaggacacgcactgggtctcagagccactggcccaggcagaagtctccttgagcccactgggtcatatgcgtgtcaccacacgtgaactagtgtggtggctgcctgcggacaccctcctgttctgagccctgggcctgtgttcttctcagacactcccagactgaggggtggtgtgtggcgggtggcagggtggctgtggagactggggatctggagcctggtgctggcacctggcctgagtttccgtgggcagctggcggggacctgtgctgctgctgctgactgtgggtgggcgggcggcgcctgggagtggctcttgctcaggaattgataggaaccctaaaaactaggataccccctcctcggcccatgaggcacgcacagtgacttatttaagacttcccccttaatttatctgcccccaggatgcgtcagtctgttcagtggtcagcaggccccccaccccccgccgactgccctcgccatcgtggtcagacccccctcccaacacaacacgctgctggtctgtgtcagcctttgtaacgtgggaggctctgccgtgtcttccgggtgaactgtatttggattgcgcgcattgtcacggtccgcccctgggctgcaggcgccccttcctctgggcacccctgcattctgcatccccacctctagacgctgtaataaacagactgttttcactcggaaaaaaaaaaaaaaaaaaaa

SEQ ID NO: 322 - DNA, 2441 bp, Homo sapiens
accctgatcagggagtatcggctgcgggtgcgcaaggcgtccaggagtgacctggggctgtggagagcgacccgtggccttgtgtttcaggtacggaggttccggactggacgggcgtcaggaagtcacagacttgtcctctgatgtggccccgcccgccgccgcactaatctcttcggcgtcgtacccgtcggcccagctcgacccgccgcagccccggccccgaccgtggacactgggggtccccgagggcgctgcgacctcctcccgggtgaaatgaaacccgagggcagtcccccttaccgaccccattagagacgtatctgccgtgccaggggtctaggctccagaaacagggagtttaccacctaggatgacttcagtgactagatcagagatcatagatgaaaaaggaccagtgatgtctaagactcatgatcatcaattggaatcaagtctcagtcctgtggaagtgtttgctaaaacatctgcctccctggagatgaatcaaggcgtttcagaggaaagaattcaccttggctctagccctaaaaaagggggaaattgtgatctcagccaccaggaaagacttcagtcgaagtcccttcatttgtctcctcaagaacaatctgccagttatcaagacaggaggcaatcctggcggcgagcaagtatgaaagaaacgaaccggcggaagtcgctgcatcccattcaccagggcatcacagagctcagccggtctatcagtgtcgatttagcagaaagcaaacggcttggctgtctcctgctttccagtttccagttctctattcagaaacttgaacctttcctaagggacactaagggcttcagtcttgaaagttttagagccaaagcatcttctctttctgaagaattgaaacattttgcagacggactggaaactgatggaactctacaaaaatgttttgaagattcaaatggaaaagcatcagatttttctttggaagcatctgtggctgagatgaaggaatacataacaaagttttctttagaacgtcagacttgggatcagctcttgcttcactaccagcaggaggctaaagagatattgtccagaggatcaactgaggccaaaattactgaggtcaaagtggaacctatgacatatcttgggtcttctcagaatgaagttcttaatacaaaacctgactaccagaaaatattacagaaccagagcaaagtctttgactgtatggagttggtgatggatgaactgcaaggatcagtgaaacagctgcaggcctttatggatgaaagtacccagtgcttccagaaggtgtcagtacagctcggaaagagaagcatgcaacaattagatccctcaccagctcgaaaactgttgaagcttcagctacagaacccacctgccatacatggatctggatctggatcttgtcagtgactttatgagagtttctgccacaaggtgcccaagaggagaggaatgggaagagtgccccagcacgtggtgactgcgtgatttctgctcgttgcctttgaagataactggcaggactgactgtagaacactttgacttttttcaaaaagtgatggaatttgtacatccaaatgaatattgtatagacaattttcccaggaatgtgcaaaatgcttgaaagttcaaacttcttttttgaaatgatcttcagatccagtggcccattcttttatctttatcctgtgaaggtgtttttcaggttttgaaacaatccaaaaatcatttaggaccaagtctaaggaaacattttagtggccaagttggattccgattgtaaaggaatgatactaattttctagcatggctctgaaggtgattttaggtagaagagttttgaggctgggcgcaatggctcacgcctgtaatcctagcattttgggtgactgaggcgggtggattgcttgagcccagaagttgaagaccagcctgagaaataaggtgaaaccctgtctacaaaaaatacaaaaagttagctgggtgtggtggcgtgtgcctgtagtgctagctactcagaaggctgaggtgggaggattgtttgagcccaggaggttgaggctgcagtgagttctaattgcgccactgcactccagcctgagcgacagagtgagacactgtcttaaaaaaaattaaaaattgtaaaaaaatgaaaaaaaaagttttgagcattatttgcatcattgggatacatatgtcacttcacaagatgttcaatttgaaggaaataccactcattctctatgtcctgttgtctgtagtgtgcttcagtttttcatattgagttgacctaaatcctggattcatgacaagaaaggagtaagtactactattcattgttctatttgtttataatctgtattataaaattgcacataattaaaagctttcccttgtcttcatcta

SEQ ID NO: 323 - DNA, 5795 bp, Homo sapiens
gagcagcggcagcagcagcggaccccggcggcggcggcggcgcgcggtcccagccaggcggccccggtgtcccggccccggtggatgcacggctggggaggagcccatgggccggagctgaggctgcccggggcggcggggcgcggggcagggggcgcggtcgaggcccggaggcggcggcgcaggaggaagcggaggaggtcgggcgctcggggcccgggaggcgggccgcgcagcgccgcagccccgggctcgccatgctcctggcctcggccgtggtggtctgggaatggctgaacgagcacggccgctggcgtccctacagcccagcggtgagccaccacatcgaggcggtggtccgcgccggcccccgcgcggggggcagcgtggtgctgggccaggtggacagccgtctcgcgccctacatcatcgacctgcagtccatgaaccagttccgccaagacacgggaactctccgcccagttcgccgcaactactacgacccctcctcggcccctgggaagggcgtggtgtgggagtgggagaacgacaatggctcctggacgccctacgacatggaagtgggcatcaccatccagcatgcctatgagaagcagcacccctggatcgacctcacttccattggctttagctacgtaattgacttcaacaccatgggccagatcaaccgtcagacccagcgccaacgccgcgtccgccggcgcctcgacctcatctaccccatggtcacagggaccttgcctaaggctcagtcctggccagtcagccctgggccagccacctcgccccccatgtccccctgctcctgtccccagtgtgtcttggtgatgagtgttaaggcagccgtggtcaatggcagcactgggcccctacagctgccagtgacccgcaagaacatgccgcctcctggagtggtcaagctacccccactgccaggctctggggccaagccactggacagcacaggcaccattcgaggcccactgaagaccgccccatcgcaggtgatccggagacaagcctccagcatgcccactgggacaaccatgggctctcctgccagtcccccaggacccaacagcaagaccggaagggtggccctggccaccttgaatcgtaccaacctgcagcgactggccattgcccagtcccgggtgctgatcgcctctggggtccccacagtcccagtgaagaacctaaatgggtccagtcctgtcaaccctgccttggcaggaatcactgggatcctcatgagtgcagcggggctgcctgtgtgtctcaccaggccaccaaagctggtcctacacccaccccccgtcagcaagagtgaaataaaatccatcccaggggtttccaacacaagccgcaagaccaccaaaaaacaagccaagaaaggtaaaaccccagaggaagtgctaaaaaaatatctacagaaagtccggcacccaccagatgaggactgcaccatctgtatggaacgcctcacggccccctcaggctacaagggcccgcagcctacggtaaaacctgacctggtagggaagctgtccagatgcggccacgtctaccacatctactgcttggttgccatgtacaacaatgggaacaaggatggaagtttgcagtgtccaacctgcaagaccatttatggggtgaagacaggcacccaacctccagggaagatggagtaccacctcatcccccactccttgcctggccacccagactgcaaaaccatccggatcatctacagcatcccccccggcattcagggaccggaacacccgaatcctgggaagagtttcagcgcccgaggcttcccacgacactgttaccttccggacagcgagaaagggagaaaagttctgaagctgctgctcgtggcctgggatcgccgcctcatttttgccattggcacctccagcaccacaggcgagtcagacaccgtcatctggaatgaggtccaccacaagacagagtttggctctaatctcactggccatggctacccagatgccaattacctggataatgtgctggctgaactggctgcccagggcatctctgaggacagcactgcccaggagaaggactgaggccagaaaagctttgaggtgggaggggccatggagactgcaggacaggaagtgaggagagtgagtcaatgtagaagaagttggtgtcctgccctcccaactttctatcctcccctcctgccctgtgtccatccctcatccctcccaaccacagtgggagccagactgaatatagcgacatcattcataaatctcatccaacacaaagggagatgggatgagggccatcctgggtctgttcccatggagtttttggtgctgggtaggcaggaatcccctccctaccccacctcccaagtaggggcatggtcagcacacctagggtatgggcagtgcttaggcactccatatcctggctttgggaagccggggtttcttgcctcagccggcttcttgctacttccactctgctttgagactggagtttctgctattctccctctgctggaggcagggagctctcactgtgcaaggttggggggtgggcaaaggggtgaatcactaaactgctgtgacatcagaaactgatgccttggtgtagagcaaggaagcacttcttcccaagagggtcggagaaggaaaagcctctgggagcacattctgctgtcatcacagtccttggcttctctgggccctcctctcctcctcacagctctcacctgtccaaagaggcatctggttctctcatgtggatggatggactctggggttcctctttggagtggcatcccatgatgctgtttctagaccctctctgatcaaaccagagcctgcatcccactgagcatctgaactgtcctcagggagaggagcccacagccttcttcccaactcattctagaccagctcaaagattccatgagtttcatcgagtcactgtgagtggagcccatgctgggctctgtgccctctgtgtctgtgcatgcgcgtgtgtgtgtgggcgtgtgtgcattgctgggccagcttgaagggaaggcccgtcatgtccctgcactctgttttgcaagatgccaaaccccagttctgatggggctccaacagccaggctgtggtcctttgacgttcctcacctgttgccaacctatcccgtagtgaactgaaaccccaatgaagacagaactgtgcctggggagatgcaatgaggtgagggctgaactcatccttttatatttcttttcaagattggatcagagctcatctccatccagtcttgtttctatgaaggcttcaatctgtttccatgcaaatttgctaatcagagcccagagctgctgggtccctcatctccctcatctattatagattgacttacagcagggagagaatctctttagctcattcctaatggagttgggatcacaatatggtctggtccaatctgcatcttgttgtgtcccaagaccctatctcctccccaacattcttattgcctttggctcccagtaaggaacgaattgggggccagggaggagaacaggggggatcaagaagggaaacccaattccccctttgaaagtgggttctttgaactatgtgtttgggggaagttcctctggatactaatttgaatttatatacctcatgttttgggggtttgacgtatatatatatatatatatatgcatatatatttcataatatttggaaggtttttgatgctagaaaaatggaaacaagagaaccttcaaaaatggtacttagatgggaactggaggccaatctttcataaagccagccccatagctgcttgctgttaggcctccagccattttgacattggggtggatagtcgattcacctgcctgtcagtcgattcacctgcctgtcacccagttctgtggatgtgctggtgctgagcctttgctctctttccaaatggttacagggatgttgatcagctccaccagagggagctctgatgggaggaattgctctgccatccttgtccctgtgtctcctgtcggcaggcagccattgtatctcaccagcagaccaggagactggtcccaaggttactgcaccacagggcaatttcctgccatagttaggaaggaaacacctgaactaaatggaagagacatccctgcggtgtttaatatcacacccatgccctttgtcaggttaccatgtacagagattacttggagagcctcatgccgtctctaccttcgcacactggtcaagtatctgctgagcttcttggccgcaaggatgcagaaataggctgagggtccatgggaagaaagacacaatgaggcagtaggaggtggggaagaaaagaagacagactttcaaaatggaattaggcactggggagagatcagtttccccacatcagggagaagaaggtataggtggggaagggggtggccaggagcagaaggaagaagactcaagatggaaagggagccgctgtgcctgtggcaataccacttggagaggtcgacttcataccttcaagccttttcccctgggcttttgattgtgtctgtgccccctttcttgtcctctctgcagatgcccagtaggggctacctcatcctcgtgctgttcttgtgtggctttctgggcagtagggatcttgaatttcctttctaacactgtgcccggcaaggcggggagcattcctctgccctttgtcttgtgccaacctggaaaggtgcagtctagatttcagtgagaaccctgccagctgagccctgtgcatctactaccttgacacagagtgttttcccactagaagctctgctctgctctcctggcccaagtaggggattccatgccttccctttcatggtcttagcaccagcagcctagtttctcccttccagagtctccagggatgacaaattggattggagacaaacctcgtcagatgctcatcccctaaaaggttaattgtgtatttgtggctgcgtgtgcctttgtgttttcattctcttcccatttttgtacattttggtcttctctgtggttttatacttggtcaaaagtactcgtcttggtattgcactgttgtgtgcatgagaaaactgggggaaggctcactggtacaagaaaggacccctgacccctttccttctctgtggtccccggcattagattgggggttctgggagaggcaggtgaatgtcctaagtgaattgttctgtttgtaactggaatgtttttgaagtctttggtgttgctccgtgaaaggacatcgccacctggtgctcatgaggtgtctttgcagaacaataaatggcaaatgaacaaccacaaaattgttactcttgttggccttctgctgtttgtagattagtgcacctatctgtgagggatttgggttacctccctgagtctgtaagcaaccacaagccctgccactgggtgggggaagtccctccccaaccacttaaaaacaaattttccacatattacccacccacacatttgacctggctagactttgtttgcctaaaggaacagaccacattgctgggaaaatgagtaagtgaacgtgtgggagaaaaacacttttagaatcacgaatattcacttttaaaggtctctttgcctggctgcaatatagtgtgtgtttaaattatttacaggctgttgtttctcaaataaatgtttaatattaatcattcccaaactgacaagaacacaaaaataaaatgcaaatacagagcc

SEQ ID NO: 324 - DNA, 7498 bp, Homo sapiens
agaggagccgggacaccgagggaagaggccggagggagatcgcggaggggagggggcgggaggggggtggggtatcctgagtcgtccgtggtccggagtctggaaggccctagagcggcgccagtcgacccgcctcgccacaacttgcccagaccagacacgtttcatcctgcgccctgcaagaaggagccggcctgcctctctccgctttgctgctcctcggcctccgcgggcccggcccgcgtcagcagcgaccctggggtctgggtcccctgtgtcgcccccgcccgcctgcagcgcccggcacccgcccaggagcgcgcagctggggttctagggacgtatacttgagcaagagagaccacagctcttgttcccgctgatcctgcagcccagtggatggagtccagaatctacagacctgccaggaaagaaaaaaaaattcctgatgtctggtccaagcaggaattccccggtggattggggaatgtctggcttttcctcagcttattgatctctgtggtaaccactggaggcccccagaagacccatagaaatgagaggcctgaggtctacaagtcgctgctagaaatattttagcctctccaaagcccagaatgcagccccgacccaagtttgtaagggttctgggtgcacgctgaccctgcgcgggcagacgcgccctttgctccaggtccggacctgggcgctgctatagcaacgtcctggacgcccagaccttaggccgccgccgccgcggaagcgaggaacccggccttctcccgctcctgagggctgtggcggcggcggcccgggaggcggcccaggctgggtaaagaccgcccggctcctcctatgcaagctgaggcagcggattggttttcaagcatgcccttccagaagcatgtctactacccgctcgccagcggcccagaggggcccgacgtcgctgtggccgccgccgccgcgggtgcggcctccatggcctgtgcgccccccagcgcggcttcggggcccctgcccttcttccagttcaggccgcggctggagagtgtggactggcggcggctgagcgccatcgacgtggacaaggtggcgggggctgtggacgtgctgacgctgcaggagaacatcatgaacatcaccttctgcaagctggaagacgagaagtgcccacactgccagtcgggggtggacccggtgctgctgaagctcatccgtctggcgcagttcaccatcgagtacttgctgcactcacaagagttcctcacctcgcagctgcacaccctggaggagcggctgcgcctgagccactgcgacggcgagcagagcaagaagctgctcaccaagcaggcgggggagatcaagacgctcaaggaagagtgcaaacgccggaagaagatgatctccacccagcagctgatgatcgaggccaaagccaactattaccagtgccatttttgtgacaaggcctttatgaaccaagcttttctacaaagtcacattcaacgccgccacactgaagaaaattctcattttgagtatcagaaaaatgcacagattgagaagctccggagtgagatcgtcgtattgaaggaagagctgcagctcaccaggtctgagctagaggctgcacaccatgccagtgcagtcagattctccaaggaatatgaaatgcagaaaacaaaagaggaagactttttgaagttatttgacaggtggaaagaagaagaaaaggagaaactagttgatgaaatggaaaaagtcaaggagatgtttatgaaggaatttaaagaattaacttcgaagaattcagcattagaatatcaactgtcagaaatccagaagtccaatatgcagatcaagtccaacataggcacattaaaagatgcacacgagtttaaagaagaccgttctccatatccccaggatttccataatgtcatgcagcttcttgatagtcaggaaagcaaatggacagctcgagttcaagctattcatcaagaacacaagaaagagaagggtcggctcctgtcacatatagagaaacttcgaacctcaatgatagatgatctaaatgcaagcaatgttttctataagaaaaggatagaagagctagggcagagactccaggagcagaatgagctgattataactcagagacagcagattaaagactttacctgtaatccattaaacagtatcagtgaacccaaaggaaatcctttagcctggcaggcttttgaatctcagccagctgctccagctgtgcctatgaatgccccagccctgcacactttggaaactaaatcaagtctgccaatggtgcatgaacaggcattctcgtcgcacatactggaaccaatagaagaactttcagaggaagaaaaaggaagggaaaatgaacagaaattaaataacaacaaaatgcatttaaggaaagctttgaagagtaactcctccctcactaagggactaagaacaatggtggagcagaacttgatggagaaactggaaaccttggggattaatgcagatatacgtggcatttcaagtgatcagttgcatagagtactaaaaagtgtggaatcagaaagacataagcaagaaagagaaatacctaactttcatcaaattcgagaattccttgaacatcaagtcagctgtaaaattgaggagaaagcactactctcttcagatcagtgcagtgtttctcaaatggataccctttcaactggagaagtacccaaaatgatacaacttccttccaaaaacagacaactgattagacaaaaagctgtttctactgataggacatctgttccaaaaattaagaaaaatgtcatggaagatccttttcccagaaagtcttcaactattacgacccctccttttagttcagaggaggagcaggaggacgacgacctcatccgggcatacgcatccccaggcccacttcctgtgccgccaccacaaaacaagggcagcttcgggaagaacacagtgaaaagtgacgcggacgggaccgagggaagcgaaatcgaggacactgatgattctcccaagcccgcaggagtcgccgttaaaacacctactgaaaaagttgaaaagatgtttccacatcgcaaaaatgtgaacaaaccagtcggtggaactaatgtccctgagatgtttatcaaaaaagaagaattacaagaactaaagtgtgcggatgtggaggatgaagactgggacatatcatccctagaggaagagatatctttgggaaaaaaatctgggaaagaacagaaggaacctccacctgcgaaaaatgaaccacattttgctcatgtgctaaatgcctggggcgcatttaatcctaaggggccaaagggagaaggacttcaagaaaatgaatcaagcacattaaaaagcagcttagtaactgtgactgattggagcgacacttcagatgtctaattccacatgtcagaagattattccagaagccagcagtatttcagtatcacagtgtttcagtaatttgcctccatgattctagtgcttctgccttaccgtgtttcccacagcaacacagagactgattcaaagaacaatggtctctttaatggcacccaatacagtattgaaaatcagatcatcaacagtatttcgaagcatgtaaaggtgtttaagacttccgctgctgcttaaaaataacatgtcattgaagtcataaaaagttttttcttcagaaaggtactctagtgttaagtgtatttttttcaactaattttttagtgaattttttttaaacttacagcatgttttggtttgaattactaaaactttaaaaaatatttttcttatgtatgctgtcgtatcgtaggcgtttatattataaaattctgttagtagtcttaaaattgaattggtggaaccactaatccttaaaagttagtctggttatttttcatatagaagtaagtttaatccgagtgtggtggtgttcacctttaatcccagctacttgggaggctgaggtgggaggataacttgagcacaggagttcaagaccagcgtgggcaatatagcaagactccacccctccacaccccaaaaaagtaagtttaggattagaatatagctaggtccaatgttaaatacattttcctggagtacatttgtcacattcagctttgagccactgtaagcatgttactattaaatggttggttattttatatagcatattctttatcttggatattttatgaataaagtatagttattttaagtgccaattaatttatcagactaaatagaaaatatttgagccattactgaattcacatatgtatgtttttttttactatttaaaatacccaacatgtattatgaaatacctcaaaagtaatttagttacattcttaaacaatgacattgtcgaaagaaagttcttataagctgttttttgcatttttataacttggttatactatattctgtttccaagtaaccttttaactaaaagatttgttgggttttagatctcttttcatttgtcaaccttttcagtaaagccctctgttacatcactgtgactgtggctgtgttattagagatgaattctgagttaaatttgtacttattaggggtcttacagagggagaatctggccttgattgctatgccatatgacattctgtcctaatggttagaacaaatctttatctgtttccacccaccctgggatcctttttacttgtagcccattcctgccctctaaaagaatccttccaacttcctataggggccatttcatgcagatatactcactttatatgtatgtttctaaaagctttagtgaaggctgaatccaagtttcatgtagtaggacagagaacagaaggccgaatccaagtttcatgtggtaggacagagaacggcaatctacaaaactacaccaagcctaagatggcccatgtgccactttgttcattcatttatttattcagcagatatttattgaaccacttggtctggtttggttttgaacacgcactaattcatttaattacaacaactttgcgatgtagttattgttataatcctcatcctaaaggtgtgagaaacagagttattaagtaagttgccagaagccatacaagtacaaagtgtcaaggggagactttaagccaggtctctattccatgttttgtgtctgccatgttttcattcctgagcagaagagcttggggaaatgaacttttgctaagtaaacccagtatttaaattaagtcactatatctgtgtcttttaagagcccctcctttagcttacatggttagttgtatctttttttttttttttttttgagacagagtctcactatgttgcccaggcttgagcgcagtggcaccatctcggctcactacaacctccgcctcccagattcaagcgattttcctgcctcagcctcccaagtagctgggattacaggtgcccaccaccatgcctggcttaattttttgtatttttagtagagatgaggtttcaccatgttggccagactggtctcgaactcctgacctcaaatgatccgctgtcttgtcctcccaaagtgctgggattataggcgtgagccatcgcgccctgctgcatttcatttttttgtataaaatttggtttgttcgtttttgaggggaaccattcctttatgttgccccttactgatgcccaactaatgtgtttctggttactaacagaccttcatcccccaccctccctaaattcttcggtgtaatctaagcgttatctgcaccacttctgaataataaatgtgtttgaaatgcacacctacacaaccctgtcccacactggcctgtaggacctaatctaccttcatgtctttcagttgatttgtatttctgcaaaagatatttcaaggattatcaaggtatggaattttttttattttttatcttttaacaaacttgttcatttccttttctttccattgagcacctctgaacaatgtgattcttttttttaagtctttcacacttcaggaaaatactacattcacccacgttgtgattcatatcggacagtttcttactcaaagataacacaaataccaattcttattcatactttgaaactatattttaccctagactgccttggttcaaaggcctagtttcgacattactgtggcaaattatttaagctctctgttttcatttctttttctgtaaatgcaggatgaaaacaatatgtatctcctaggatggctgtgaggagtgagtgagacaggacatgaaaggtgtgtatgaactgtgataactgttgcccttgtgggcatgttatatagggctggctctaggaagaagcctgtgtcttttttcagaaatccctggagcaacttaaatgtctttagaaatgacaagtctctcagttatccagttagccgtaaacaggttctggaagacacacctagatagaactcggcccgtcagttctgagtgaggcacgtaccacttgggcttgggatgtccttaacccatttatgcctgaggttgcaattttttgaatttttccaatcacaccttggcgatgaccttgagcagtaggatataaataactcccacatgcttagtgttccaataatggaacactaggcataaacaggttttaattggctcctcagtcaaccatgaccaatatctctatctcagcttctgctgatgccctagctcagggctctgcattccgtgccagggacgcctcagccccttaacatggatgtgccacatgacaggcaataatatattggccccattagcccttcctggagcagtcataatgaattacagtcatgacaggcacatgtaagaaaccaaaatttgctaaatatgtacatgagtcttcatcacagcatcgtttatgaaaacaactaaatattcactaatggtgccagtggaataaatcagagaacatcccctgctacgtaactctctgcatacatcaaagagaatggtgtggctttgctttttcaacaatctactgagtggccatgggcatgtggatatggccatgaatgagcaagatcctctctgatcctgtagaagttaagttctaccagataacttgctgcttcaacaaaaagatttacctttttaaataaatgttgtagaatacttaaaaaaaacaaactagaatttgcctgtgtgcagccagtaacatgtctatttaacctggacaccttttgaggaatattctcagattgcccccatgctgtttataagacattgttccttatacacctgtttatgaatgaaaagaaacataaggagtgggtacaaagacttctatctatgaatgattaaaaaggctagagtacgaatacttcttgaacctttggtactaaatgcttttcatgttctatataaatgtagaaaacattttacaaatcctgtaaataaactgtttattttttatagaaagccaaaaaaaa

SEQ ID NO: 325 - DNA, 2112 bp, Homo sapiens
ggagctgtttacccccactctaataggggttcaatataaaaagccggcagagagctgtccaagtcagacgcgcctctgcatctgcgccaggcgaacgggtcctgcgcctcctgcagtcccagctctccaccgccgcgtgcgcctgcagacgctccgctcgctgccttctctcctggcaggcgctgccttttctccccgttaaaagggcacttgggctgaaggatcgctttgagatctgaggaacccgcagcgctttgagggacctgaagctgtttttcttcgttttcctttgggttcagtttgaacgggaggtttttgatccctttttttcagaatggattatttgctcatgattttctctctgctgtttgtggcttgccaaggagctccagaaacagcagtcttaggcgctgagctcagcgcggtgggtgagaacggcggggagaaacccactcccagtccaccctggcggctccgccggtccaagcgctgctcctgctcgtccctgatggataaagagtgtgtctacttctgccacctggacatcatttgggtcaacactcccgagcacgttgttccgtatggacttggaagccctaggtccaagagagccttggagaatttacttcccacaaaggcaacagaccgtgaaaatagatgccaatgtgctagccaaaaagacaagaagtgctggaatttttgccaagcaggaaaagaactcagggctgaagacattatggagaaagactggaataatcataagaaaggaaaagactgttccaagcttgggaaaaagtgtatttatcagcagttagtgagaggaagaaaaatcagaagaagttcagaggaacacctaagacaaaccaggtcggagaccatgagaaacagcgtcaaatcatcttttcatgatcccaagctgaaaggcaagccctccagagagcgttatgtgacccacaaccgagcacattggtgacagaccttcggggcctgtctgaagccatagcctccacggagagccctgtggccgactctgcactctccaccctggctgggatcagagcaggagcatcctctgctggttcctgactggcaaaggaccagcgtcctcgttcaaaacattccaagaaaggttaaggagttcccccaaccatcttcactggcttccatcagtggtaactgctttggtctcttctttcatctggggatgacaatggacctctcagcagaaacacacagtcacattcgaattcgggtggcatcctccggagagagagagaggaaggagattccacacaggggtggagtttctgacgaaggtcctaagggagtgtttgtgtctgactcaggcgcctggcacatttcagggagaaactccaaagtccacacaaagattttctaaggaatgcacaaattgaaaacacactcaaaagacaaacatgcaagtaaagaaaaaaaaaagaaagacttttgtttaaatttgtaaaatgcaaaactgaatgaaactgttactaccataaatcaggatatgtttcatgaatatgagtctacctcacctatattgcactctggcagaagtatttcccacatttaattattgcctccccaaactcttcccacccctgctgccccttcctccatcccccatactaaatcctagcctcgtagaagtctggtctaatgtgtcagcagtagatataatattttcatggtaatctactagctctgatccataagaaaaaaaagatcattaaatcaggagattccctgtccttgatttttggagacacaatggtatagggttgtttatgaaatatattgaaaagtaagtgtttgttacgctttaaagcagtaaaattattttcctttatataaccggctaatgaaagaggttggattgaattttgatgtacttatttttttatagatatttatattcaaacaatttattccttatatttaccatgttaaatatctgtttgggcaggccatattggtctatgtatttttaaaatatgtatttctaaatgaaattgagaacatgctttgttttgcctgtcaaggtaatgactttagaaaataaatatttttttccttactgtaaaaaaaaaaaaa

SEQ ID NO: 326 - DNA, 3533 bp, Homo sapiens
aggggaagacgtggcaccagtcggaggggcggggctgggaggggctcctccctaccgcccccaattccgccctgcccccgccgcggcggcgctagccgccactgagggaccgaccctataaaggccgctccgcgaggggtgcgcagcattcggcagagggcgcttcgacgggctgggctgtgcgcctgcgcagtgtgggtcgctcccgattccctgccccggccggccccgcctcggctccgcaccctcgccccgctctcagccgccgctctgccccgcagcagccagccccgtgtccggcagtatgttcagctgggtcagcaaggatgcccgccgcaagaaggagccggagctcttccagacggtggccgaggggctgcggcagctgtacgcgcagaagctgctacccctggaggagcactaccgcttccacgagttccactcgcccgcgctggaggacgctgacttcgacaacaagcctatggtgctcctcgtggggcagtacagcacgggcaagaccaccttcatccgacacctgatcgagcaggacttcccggggatgcgcatcgggcccgagcccaccaccgactccttcatcgccgtcatgcacggccccactgagggcgtggtgccgggcaacgcgctcgtggtggacccgcggcgccccttccgcaagctcaacgcgtttggcaacgctttcctcaacaggttcatgtgtgcccagctgcccaaccccgtcctggacagcatcagcatcatcgacacccccgggatcctgtctggagagaagcagcggatcagcagaggctatgactttgcagccgtcctggagtggttcgcggagcgtgtggaccgcatcatcctgctcttcgacgcccacaagctggacatctccgatgagttctcggaagtgatcaaggctctgaagaaccatgaggacaagatccgcgtggtgctgaacaaggcagaccagatcgagacgcagcagctgatgcgggtgtacggggccctcatgtggtccctgggcaagatcatcaacacccccgaggtggtcagggtctacatcggctccttctggtcccacccgctcctcatccccgacaaccgcaagctctttgaggccgaggagcaggacctcttcaaggacatccagtcactgccccgaaacgccgccctcaggaagctcaatgacctgatcaagcgggcacggctggccaaggttcacgcctacatcatcagctccctcaagaaagagatgcccaatgtctttggtaaagagagcaaaaagaaagagctggtgaacaacctgggagagatctaccagaagattgagcgcgagcaccagatctcccctggggacttcccgagcctccgcaagatgcaggaactcctgcagacccaggacttcagcaagttccaggcgctgaagcccaagctgctggacacggtggatgacatgctggccaacgacatcgcgcggctgatggtgatggtgcggcaggaggagtccctgatgccttcccaggtggtcaagggcggcgcctttgacggcaccatgaacgggccgttcgggcacggctacggcgagggggccggcgagggcatcgacgacgtggagtgggtggtgggcaaggacaagcccacctacgacgagatcttctacacgctgtcccctgtcaacggcaagatcacgggcgccaacgccaagaaggagatggtgaagtccaagctccccaacaccgtgctagggaagatctggaagctggccgacgtggacaaggacgggctgctggacgacgaggagttcgcgctggccaaccacctcatcaaggtcaagctggagggccacgagctgcccgccgacctgcccccgcacctggtgccgccctccaagcgcagacatgagtgatggcgcccggccccgcacctgccatttgcacgcccggccgggaggcagagacggggggaggggaagcctcaccatttctcaaggtccataaagactgagcggatgtttcctcgcctctcgaaaaggaaaaccaccatctttcttttaaggctgttcctgggcctggcgggggaggcaggggtgagaggatggaattgtgtgcacaagaactgtggctattttaatatataacgttagaggctgcgttctttgtcgccgcctcccctgtgtgccagccctgtgtgcacggcctctgccccccggcctttgctgtggctggagctggacagtgcagcgactgcgaccgtgggggagccaggtcgcccttttggcagctgctaggctgaggctgcatggacaggaacaccaggcaccctccgtgtgcttctgagctgaggttgcttcacgggaccgtggcttccttcctcacctggctctgcctcccccgtgctctcgggcgaagtgggttcttgtgccttcccctcccgggcccaggctccccgtgcgcgggccctgccctttcctcccgcgccccaccggctccgacgcgcaaccccgctcagcagtcacagaagcagggcccagccaccttggtctttttttgggagttcaggggagtaggagaatgtcttccagaaaaatacataagctagtttctgttctgtaaagtgatatctttcatacttgaccaaagttcccaataacttcccaaccactgttcaaaagctgtgatttttgtctccccttcccaccctccagccaaggagcagccctgcccagggggcattaggtgtgggtacccggggagcaccccgttcctggaccccagtgttgcatttcctggctgaggaagggtggtcatcccagctcctgccctaccctctcacttaactggagctttgggacgcaccctccacagtgggaggtggtggtgggtggcggtggcggggcctcacgacagcttggtgctggtaagaggaagcccgtggttctggctaggctctcatgtccagacagcggggaccaggggaaaacccagccccttctgtaatcccccttcatttcctaccttccttcctcctctgtttagcaaaggagggcagctcacttggatgtccttacaacgcccctggcccccaggttgagcaataagaaaccagaaccttgcggcccagtggcccgggccagttcaggccgcctccccctcctctgcctggggccattgagcccagcctccagggcccgggcgcgtttgcaggccagtggccactgtccgggctgtgatggcaccaaggcaggtggagcaccaggtaccacacagctgggcttcccaccaggctttcccgcgggggtctcagggagcttctccccagcgctgctcggagtctgcaggaactggccttgttctccttagcccgtcactccatacagtattaggtgaggatggatgcgggcgctgtccttgccgggaagtcactgttgaagttgcagtggcttgttcacacctgtgggaagagaagtgaagactttctccttgcattaaaaagtctgaactgtgcgaaagcttaaaaaaaaaaaaaaaaaa

SEQ ID NO: 327 - DNA, 3520 bp, Homo sapiens
gcggccgcccctcggccccggagcccctcggcggcgccaccatgtactcgggagccggccccgcacttgcacctcctgcgccgccgccccccatccaaggatatgccttcaagcctccacctagacccgactttgggacctccgggagaacaatcaaattacaggccaatttcttcgaaatggacatccccaaaattgacatctatcattatgaattggatatcaagccagagaagtgcccgaggagagttaacagggaaatcgtggaacacatggtccagcactttaaaacacagatctttggggatcggaagcccgtgtttgacggcaggaagaatctatacacagccatgccccttccgattgggagggacaaggtggagctggaggtcacgctgccaggagaaggcaaggatcgcatcttcaaggtgtccatcaagtgggtgtcctgcgtgagcttgcaggcgttacacgatgcactttcagggcggctgcccagcgtcccttttgagacgatccaggccctggacgtggtcatgaggcacttgccatccatgaggtacacccccgtgggccgctccttcttcaccgcgtccgaaggctgctctaaccctcttggcgggggccgagaagtgtggtttggcttccatcagtccgtccggccttctctctggaaaatgatgctgaatattgatgtgtcagcaacagcgttttacaaggcacagccagtaatcgagtttgtttgtgaagttttggattttaaaagtattgaagaacaacaaaaacctctgacagattcccaaagggtaaagtttaccaaagaaattaaaggtctaaaggtggagataacgcactgtgggcagatgaagaggaagtaccgcgtctgcaatgtgacccggcggcccgccagtcaccaaacattcccgctgcagcaggagagcgggcagacggtggagtgcacggtggcccagtatttcaaggacaggcacaagttggttctgcgctacccccacctcccatgtttacaagtcggacaggagcagaaacacacctaccttcccctggaggtctgtaacattgtggcaggacaaagatgtattaaaaaattaacggacaatcagacctcaaccatgatcagagcgactgctaggtcggcgcccgatcggcaagaagagattagcaaattgatgcgaagtgcaagtttcaacacagatccatacgtccgtgaatttggaatcatggtcaaagatgagatgacagacgtgactgggcgggtgctgcagccgccctccatcctctacgggggcaggaataaagctattgcgacccctgtccagggcgtctgggacatgcggaacaagcagttccacacgggcatcgagatcaaggtgtgggccattgcgtgcttcgccccccagcgccagtgcacggaagtccatctgaagtccttcacagagcagctcagaaagatctcgagagacgccggcatgcccatccagggccagccgtgcttctgcaaatacgcgcagggggcggacagcgtggagcccatgttccggcacctgaagaacacgtatgcgggcctgcagctggtggtggtcatcctgcccggcaagacgcccgtgtacgccgaggtcaagcgcgtgggagacacggtgctggggatggccacgcagtgcgtgcagatgaagaacgtgcagaggaccacgccacagaccctgtccaacctctgcctgaagatcaacgtcaagctgggaggcgtgaacaacatcctgctgccccagggcaggccgccggtgttccagcagcccgtcatctttctgggagcagacgtcactcacccccccgccggggatgggaagaagccctccattgccgccgtggtgggcagcatggacgcccaccccaatcgctactgcgccaccgtgcgcgtgcagcagcaccggcaggagatcatacaagacctggccgccatggtccgcgagctcctcatccagttctacaagtccacgcgcttcaagcccacccgcatcatcttctaccgcgacggtgtctctgaaggccagttccagcaggttctccaccacgagttgctggccatccgtgaggcctgtatcaagctagaaaaagactaccagcccgggatcaccttcatcgtggtgcagaagaggcaccacacccggctcttctgcactgacaagaacgagcgggttgggaaaagtggaaacattccagcaggcacgactgtggacacgaaaatcacccaccccaccgagttcgacttctacctgtgtagtcacgctggcatccaggggacaagcaggccttcgcactatcacgtcctctgggacgacaatcgtttctcctctgatgagctgcagatcctaacctaccagctgtgtcacacctacgtgcgctgcacacgctccgtgtccatcccagcgccagcatactacgctcacctggtggccttccgggccaggtaccacctggtggataaggaacatgacagtgctgaaggaagccatacctctgggcagagtaacgggcgagaccaccaagcactggccaaggcggtccaggttcaccaagacactctgcgcaccatgtactttgcttgacatgttttagtgtttagcgattgtgtaccgagtgggattcacgagaccagctacactcagaccaacagatggccagcccttccgtgacagccagcatcgaacatgagacgtcattgattttattagattctccgttttccagaatgccttccgtcccagatttcaaacttggattttgaactgcagacctgtatgagaacccaatgtcataggaaatatggtttgctaaaatctataagctgcttattaaaacagagtcccgtgtgtcctaaaaatctcctaaaaccagtctatgaactcagggctttaaaacatttttaatttatttggtcattcaatttacttgtttttaatacatgattctctatgaaattgatgggctcaaactagctgtgaatcttctgagagtgaaagcaacacaaaacacaagtgtggttttaaagccttgaacattctgatgttgtcactaaagttgatttccaggcgatgctcgtgtgcccctggcgtggctcacccaagttcctcgactgagggccggtggccatgcagaggcgtccgcaggtgccgtgttctgccagcaccgcccttcacccggcctgaactaaggagcagtggcagaaggtgggccccgtgtgtttacagcatttccaggtccagagaggttggcagacaagtgccattttaataaaaaatgtatttaaaaaaagaaaaaagacaatatactgacagtctaatcatcagatttgtcctataggactgtgacatttattttccaaagtttttaaagaatacgggtctgtggtgataaatacagtacaatcctttttcactgttatgtctttaatgtaagagaagaatatatatatctggtttgcagtaaaaaaaaaaaaaaaaaaaaa

SEQ ID NO: 328 - DNA, 3760 bp, Homo sapiens
agaaacacttggtttcatgtatgactcataagctgaagcacagacaccacttccccaatctacaggagccattttaacagctaaaacttgtcggattgctttttattttcaagctcaaaagacgatagagaaagaatacttgaaggccaagaagcttgagagaagaaaaatttcagaaaaattgtctcaatttgactagaatatcaatgaaccaggaaaactgaagcaccttccctaaagaaaacttgggtatacaattactccacagacagagctgagggttttttacccaaatcagtcactggattttgctgcctgatacgtgaatcttcttggaatttttctcatgtggatctaaggggaatgctttattatggctgctgttgtccaacagaacgacctagtatttgaatttgctagtaacgtcatggaggatgaacgacagcttggtgatccagctatttttcctgccgtaattgtggaacatgttcctggtgctgatattctcaatagttatgccggtctagcctgtgtggaagagcccaatgacatgattactgagagttcactggatgttgctgaagaagaaatcatagacgatgatgatgatgacatcacccttacagttgaagcttcttgtcatgacggggatgaaacaattgaaactattgaggctgctgaggcactcctcaatatggattcccctggccctatgctggatgaaaaacgaataaataataatatatttagttcacctgaagatgacatggttgttgccccagtcacccatgtgtccgtcacattagatgggattcctgaagtgatggaaacacagcaggtgcaagaaaaatatgcagactcaccgggagcctcatcaccagaacagcctaagaggaaaaaaggaagaaaaactaaaccaccacgaccagattccccagccactacgccaaatatatctgtgaagaagaaaaacaaagatggaaagggaaacacaatttatctttgggagtttttactggcactgctccaggacaaggctacttgtcctaaatacatcaagtggacccagcgagagaaaggcatttttaaattggtggattctaaagcagtgtccaggttgtgggggaagcacaaaaacaaacctgatatgaattatgagaccatgggaagagcactcaggtactattaccaaaggggtattctggcaaaagtggaaggtcagcgcttggtgtatcagtttaaagaaatgccaaaagatcttatatatataaatgatgaggatccaagttccagcatagagtcttcagatccatcgctatcttcatcagccacttcaaataggaatcaaaccagccggtcgagagtatcttcaagtccaggggtaaaaggaggagccactacagttctaaaaccagggaattctaaagctgcaaaacccaaagatcctgtggaagttgcacaaccatcagaagttttgaggacagtgcagcccacgcagtctccatatcctacccagctcttccggactgttcatgtagtacagccagtacaggctgtcccagagggagaagcagctagaaccagtaccatgcaggatgaaacattaaattcttccgttcagagtattaggactatacaggctccaacccaagttccagtggttgtgtctcctaggaatcagcagttgcatacagtaacactccaaacagtgccactcacaacagttatagccagcacagatccatcagcaggtactggatctcagaagtttattttacaagccattccatcatcacagcccatgacagtactgaaagaaaatgtcatgctgcagtcacaaaaggcgggctctcctccttcaattgtcttgggccctgcccaggttcagcaggtccttactagcaatgttcagaccatttgcaatggaaccgtcagtgtggcttcctctccatccttcagtgctactgcacctgtggtgaccttttctcctcgcagttcacagctggttgctcacccacctggcactgtaatcacttcagttatcaaaactcaagaaacaaaaactcttacacaggaagtagagaaaaaggaatctgaagatcatttgaaagagaacactgagaaaacggagcagcagccacagccttatgtgatggtagtgtccagttccaatggatttacttctcaggtagctatgaaacaaaacgaactgctggaacccaactctttttagttaatataccaaagcttatgaataattgtttgttaattgaacattttcaattatatgcagactgactgattctaagataaattctaaggaggtttctaattttgtaattgttaaaaatagagttaattttgactttgttagatgagggaggaaaactcaactgtttctctttgttatctaaatgtttcagaattcaatcgtgaaggaacaggcattttacactatgaagacattcttttgagatttttatttcagttgctatatcataagcatttttaaagtttcttttctaattttacattgtattagattttctgattcttttgtaaatacagaacttaaatagaaggcaacaggaaatttatataggaactattttcattccacttgtgtaagttaagtcttgactctttcaaatgcaaaaaacctattttatgctttgttaaaattatggtgtcacttagattgactttagttgactgcactatataatatagaactatgaatatgtagaataacatgaaaaattggaggtgctggtggtatggctgaccctgtttcagaagcaggatagtataaaagcatcagcctaagaatggcactcccactaactagctatgtaatcttgacctctttgggctttagttcctctcataaaaggaagagatgtattggattagactagatgatcaccactttctcttctagttctaatttttttaattctaatacctatattttcaagttatgtcaattaaatcattatcaggttatttcctaatgtaagaatagctaaaatgttgcagagaaataagtgacccaacaaaatttattcatctgttatgggtaagatctgccataaattcttcctaaataatttgtttactaactctttaggccactgtgctttgcggtccattagtaaacttgtgttgctaagtgctaaacagaatactgctattttgagagagtcaagactctttcttaagggccaagaaagcaacttgagccttgggctaatctggctgagtagtcagttataaaagcataattgctttatattttggatcattttttactgggggcggacttggggggggttgcatacaaagataacatatatatccaactttctgaaatgaaatgtttttagattactttttcaactgtaaataatgtacatttaatgtcacaagaaaaaaatgtcttctgcaaattttctagtataacagaaatttttgtagatgaaaaaaatcattatgtttagaggtctaatgctatgttttcatattacagagtgaatttgtatttaaacaaaaatttaaattttggaatcctctaaacatttttgtatctttaattggtttattattaaataaatcatataaaaattctcagtgtctgttttcaggcaaaagtttcttaaagaataagtgtgcagagaatattactagaacatcagcattacttaatgtttataaataaatttcattagtcagaattgcaaaaaaaaaaaaaaaaaaaaaa

SEQ ID NO: 329 - DNA, 4220 bp, Homo sapiens
tgggcggccagccccggcgcacagccgcggccggggcgcgcggcgcggggcggaaaagcctgtttacacagactgcacaccgcctggggaataatgcagtaaaggaagtgagccggctcggcctgactgctccaacttcctgctctcacacacaccagaggggaaaaaaaaagaggagcgagagaaagaaaaaaagggggaaaaatcaggatctcattacaagagccacagaccgtctgcagacgcctgtcagcatggaaagtcgggggctttcgcccgggtcctcctagaaattccccccgaagaagactcccccacatctgggtatggagagtgcaatcacgctgtggcagttcctgttgcagttgctgctggatcagaaacatgagcatttgatctgctggacctcgaacgatggtgaattcaagctcctcaaagcagaagaagtggccaagctgtggggactccgaaaaaacaaaacaaatatgaactatgataagctgagcagagccctgcgatactattatgacaagaacatcatcaagaaggtgatcgggcagaagtttgtgtacaagtttgtctctttcccggagatcctgaagatggatcctcacgcggtggagatcagccgggagagccttctgctgcaggacagcgactgcaaggcgtctccggagggccgcgaggcccacaaacacggcctggccgccctcagaagcacgagccgcaacgaatacatccactcaggcctgtactcgtccttcaccattaattccctgcagaacccaccagacgccttcaaggccatcaagacggagaagctggaggagccgcccgaagacagcccccccgtggaagaagtcaggactgtgatcaggtttgtgaccaataaaaccgacaagcacgtcaccaggccggtggtgtccctgccttccacgtcagaggctgcggcggcgtccgccttcctggcctcgtccgtctcggccaagatctcctctttaatgttgccaaacgctgccagtatttcatccgcctcacccttctcatctcggtccccgtccctgtcccccaactcacccctcccttctgaacacagaagcctcttcctggaggccgcctgccatgactccgattccctggagcccttgaacctgtcatcgggctccaagaccaagtctccatctcttcccccaaaggccaaaaaacccaaaggcttggaaatctcagcgcccccgctggtgctctccggcaccgacatcggctccatcgccctcaacagcccagccctcccctcgggatccctcaccccagccttcttcaccgcacagacaccaaatggattgcttctgactccgagtccactgctctccagcatacatttctggagcagccttagtccagttgctccgctgagtcctgccaggctgcaagggccaagcacgctgttccagttccccacactgcttaatggccacatgccagtgccaatccccagtctggacagagctgcttctccagtactgctttcttcaaactctcagaaatcctgatgacgtctggccacaattaaggactcattaactgatgaaacaaatttgtccccacgggctagtttacctgtgtcgtgagaaggacattgtgaaactcttgttaatttggtttgcacttttcataacatggatagtctagatttatgttagcattttaaaaactgtttttgatatattcaagtatatatgaaaatctgtttggcattaagtgaattttaatgtttttgtttttatatccttttagctcttaagtgttgaacactgttgacagtgaagaacttttcttaatggttttcagtataactaataaggatgtgaagcttttttctctttagttctgagtatgctaaactgtgtgcttatatagactataaccagttgtgccttccttcgcatttaatgtaaatgaatgatttatatattttttagtattaagaggaaatgtttgaaagatgaaaattagtatcaaacagctctctagtagaatttcattatttttcaccagtgggcaatatgaaagcatatatcacgttttgttttactttcaattgtataagaattgccttagaacctcttttgaactgaaattcagtaaatgtccaagtaatgtttttataataaactaagccatatttagacaataaacattgataaaagaaaatgttctaaagtacattttcaaaagaatggaccttgaaaggctagcctccttagctgtttacagtatcttatcttttagatgcctcccagacaaaaatctgagatggaaaagctacatcaagttcatgctattccaggcccaagaatatctcctaggttagcatattcttatttcaaaaaattagccctggttttctcagttttccatagggaatcccgaccatctgatatatttactgtgtcagtataagtaagttggggttcccctggaactataattaacatttaaaaaatctaatgctttagaagaagctcacagagtggtgatgaacccaaacaacaaagaaaccatttttaacactaggtatcttcatcagtataggtaggtgttcacaatttttgatggatcaaaaacttgctgtaatacaaatagagagtggaggtactaaaggccttgcttgtggaaactgagagaggatacactgctttatgtattactaaagttaggggagaatgaaggaaatctgacagatgaaaaattctacaggaacctcatcatcgtggaactgaactgatgataacttggaacactccagtaaattctgttgtgtaatgtaatttggagcagtgataatacagacatattttctgttccatcagaaaatcagcaggcaccagtccaaaggtaccacacctgtacatgaagaaggaaagttctaatacaagaaaactgaaaagcaccaagctttaaattcaagattaattacaatccttaactataagtgatgataaaaactaacttgaaatgtgactaaataactgatccaaactgggcattaagtggcaggattatgagaaaggataaaaaaagagatttgagaaaacacatttcttgaattttcagaaaaaaatctagactattgctttgacacttagaaattctgaggtttttcaattggaattgagcatctctgtatgtggggatgtgggcccttatcaagggataaaaatccaaacactctaacatgcctccttgactgtaaagtaatgacactggttccaaaattcacaaataatagacactactgtccccccacccccaccccataggctaagaataattctgtaccagaataaaaggagctggtccagggaactgatatttactgaacatacaaagttagtgctagaaggggcctttgagaatgcttcccgccacctgtttccagctcaagacaggtgcacagcagaagctgggagttgcctatggctgcacagctcactgaaggtagaacaatgattggtgctcagtccaattctgtctcccccatgcctagctgttaagtaattactggttcaaaactacgtgttattagtaaaacaaacaaaacagataaagacagcatttaaaactgtgttgtcagataagagaacacatccaaaatgcatgattcttacaaactaaaggaagttaatgtgcaaaaatctcaaccaaaactactatttttagtatacttgtttacgtaaatgctgattggaaatatttaaatgactatagatctgattctttcttttcctttggaaactgggattaatgtatgctctagatccatttattagaaatgcaaaaatactacaattttttgatggatgaaaatactcctgtaacacaaacagagaactggaggaactgaagaataactcactcatatagctctgcctcattctgtgtgtgtgtgcatgtgtgtgttagcagaggtattttactcagaaaataggtttcaaagaacattaatgactttcttttcccttttatgtctgcttaatcagtgttaaactgctatgggaaaagttttatagaactatataacctgaatgttggtctctttgtacacatcttttctatgactgcaaatcttcactttatgtatcatttttactgtcatattatttttgttcaataaaaactttgtgataaaaggtgtttagaggtaaaaaaaaaaaaaaaaa

SEQ ID NO: 330 - DNA, 2804 bp, Homo sapiens
aaagccagactgattcatagaaactcctttaaaacacggtgaaaagaaaccgcccattacacaccccagtacaccagcagaggaaacttataacctcgggaggcaggtccttcccctcagtgcggtcacatacttccagaagagcggaccagggctgctgccagcacctgccactcagagcgcctctgtcgctgggacccttcagaactctctttgctcacaagttaccaaaaaaaaaagagccaacatgttggtattgctggctggtatctttgtggtccacatcgctactgttattatgctatttgttagcaccattgccaatgtctggttggtttccaatacggtagatgcatcagtaggtctttggaaaaactgtaccaacattagctgcagtgacagcctgtcatatgccagtgaagatgccctcaagacagtgcaggccttcatgattctctctatcatcttctgtgtcattgccctcctggtcttcgtgttccagctcttcaccatggagaagggaaaccggttcttcctctcaggggccaccacactggtgtgctggctgtgcattcttgtgggggtgtccatctacactagtcattatgcgaatcgtgatggaacgcagtatcaccacggctattcctacatcctgggctggatctgcttctgcttcagcttcatcatcggcgttctctatctggtcctgagaaagaaataaggccggacgagttcatggggatctggggggtggggaggaggaagccgttgaatctgggagggaagtggaggttgctgtacaggaaaaaccgagataggggaggggggagggggaagcaaaggggggaggtcaaatcccaaaccattactgaggggattctctactgccaagcccctgccctggggagaaagtagttggctagtactttgatgctcccttgatggggtccagagagcctccctgcagccaccagacttggcctccagctgttcttagtgacacacactgtctggggccccatcagctgccacaacaccagccccacttctgggtcatgcactgaggtccacagacctactgcactgagttaaaatagcggtacaagttctggcaagagcagatactgtctttgtgctgaatacgctaagcctggaagccatcctgcccttctgacccaaagcaaaacatcacattccagtctgaagtgcctactggggggctttggcctgtgagccattgtccctctttggaacagatatttagctctgtggaattcagtgacaaaatgggaggaggaaagagagtttgtaaggtcatgctggtgggttagctaaaccaagaaggagaccttttcacaatggaaaacctgggggatggtcagagcccagtcgagacctcacacacggctgtccctcatggagacctcatgccatggtctttgctaggcctcttgctgaaagccaaggcagctcttctggagtttctctaaagtcactagtgaacaattcggtggtaaaagtaccacacaaactatgggatccaaggggcagtcttgcaacagtgccatgttagggttatgtttttaggattcccctcaatgcagtcagtgtttcttttaagtatacaacaggagagagatggacatggctcattgtagcacaatcctattactcttcctctaacatttttgaggaagttttgtctaattatcaatattgaggatcagggctcctaggctcagtggtagctctggcttagacaccacctggagtgatcacctcttggggaccctgcctatcccacttcacaggtgaggcatggcaattctggaagctgattaaaacacacataaaccaaaaccaaacaacaggcccttgggtgaaaggtgctatataattgtgaagtattaagcctaccgtatttcagccatgataagaacagagtgcctgcattcccaggaaaatacgaaaatcccatgagataaataaaaatataggtgatgggcagatcttttctttaaaataaaaaagcaaaaactcttgtggtacctagtcagatggtagacgagctgtctgctgccgcaggagcacctctatacaggacttagaagtagtatgttattcctggttaagcaggcattgctttgccctggagcagctattttaagccatctcagattctgtctaaaggggttttttgggaagacgttttctttatcgccctgagaagatctaccccagggagaatctgagacatcttgcctacttttctttattagctttctcctcatccatttcttttatacctttcctttttggggagttgttatgccatgatttttggtatttatgtaaaaggattattactaattctatttctctatgtttattctagttaaggaaatgttgagggcaagccaccaaattacctaggctgaggttagagagattggccagcaaaaactgtgggaagatgaactttgtcattatgatttcattatcacatgattatagaaggctgtcttagtgcaaaaaacatacttacatttcagacatatccaaagggaatactcacattttgttaagaagttgaactatgactggagtaaaccatgtattcccttatcttttactttttttctgtgacatttatgtctcatgtaatttgcattactctggtggattgttctagtactgtattgggcttcttcgttaatagattatttcatatactataattgtaaatattttgatacaaatgtttataactctagggatataaaaacagattctgattcccttca

SEQ ID NO: 331 - DNA, 5406 bp, Homo sapiens
cgccctcccgccgcgcgctcgggatcccgaccagtcctgaccgcacgggggccgcggccacggggcgcaggggccatggtgcgcggcaggatctcccggctctcggtccgggacgtgcgcttccccacgtcgcttgggggccacggcgcggacgccatgcacacggaccctgactactcggctgcctatgtcgtcatagaaactgatgcagaagatggaatcaaggggtgtggaattaccttcactctgggaaaaggcactgaagttgttgtctgtgctgtgaatgccctcgcccaccatgtgctcaacaaggacctcaaggacattgttggtgacttcagaggcttctataggcagctcacaagtgatgggcagctcagatggattggtccagaaaagggcgtggtgcacctggcgacagcggccgtcctaaacgcggtgtgggacttgtgggccaagcaggagggaaagcctgtctggaagttacttgtggacatggatcccaggatgctggtatcctgcatagatttcaggtacatcactgatgtcctgactgaggaggatgccctagaaatactgcagaaaggtcaaattggtaaaaaagaaagagagaagcaaatgctggcacaaggataccctgcttacacgacatcgtgcgcctggctggggtactcagatgacacgttgaagcagctctgtgcccaggcgctgaaggatggctggaccaggtttaaagtaaaggtgggtgctgatctccaggatgacatgcgaagatgccaaatcatccgagacatgattggaccggaaaagactttgatgatggatgccaaccagcgctgggatgtgcctgaggcggtggagtggatgtccaagctggccaagttcaagccattgtggattgaggagccaacctcccctgatgacattctggggcacgccaccatttccaaggcactggtcccattaggaattggcattgccacaggagaacagtgccacaatagagtgatatttaagcaactcctacaggcgaaggccctgcagttcctccagattgacagttgcagactgggcagtgtcaatgagaacctctcagtattgctgatggccaaaaagtttgaaattcctgtttgcccccatgctggtggagttggcctctgtgaactggtgcagcacctgattatatttgactacatatcagtttctgcaagccttgaaaatagggtgtgtgagtatgttgaccacctgcatgagcatttcaagtatcccgtgatgatccagcgggcttcctacatgcctcccaaggatcccggctactcaacagaaatgaaggaggaatctgtaaagaaacaccagtatccagatggtgaagtttggaagaaactccttcctgctcaagaaaattaagtgctcagccccaacaacttttttctttctgaagtgaaagggcttaaaatttcttggaaatagttttacaaaaatggatttaaaaaatcctaccgatcaagatgagttcagctagaagtcataccaccctcaggaatcagctaagtaattattacttgattcttttagcaaatcaatgcacgttatcctacttaatccttaaataagtttagatttaactaacccaaagtccaggaggatgttcttacaaaaatagctatatcaagggctggcacctagacattaaactgtaatttgaaaataagcaacatgttgcataacttgttggaataattccttgttctgtttaacacttgtcataaattagcagaataaaaatagtcgtgcaacaccgggggtatctggtatgcaacgaagggaaaaatatttcactgattaaccccgaagtggttttgcatcttttccttgcttaatctaagcatattattagagaagtcacaccatgctgaagctaatgagggcaaaatggtagtccatagattattttaaaataaccctttaaggttataaaagtttaaaaaaaaaaaaaaaaaactctatcctaaatggtcattatattttgaggataagatgcagttaaaatgagaaaaatagggcaaaatatattcactattatttctaaaatatactcttttaagtagcatccaaaccagaatacagcacatgtttacttaaggagagttctttaatctattttaggaaggaactgagcagataagtggcagtacagaatgaacaaagcgtggacgaatgcagaacacttctttattatagcaacatataaaacaactataactttaaagttcataaccacactctacatcatgatcgatggtgttactcagctccctcagatttgagggaatagcttgtgaaattcttaaaatattctaaaaatattccaaaaatagcttgtgaaattcaccaaccttctttataagtacgtgggattgaaatgcacatacatgtttttgctaagagcacatacatttcattctcctcactttgttcataacctcagcattgtcagataccctcagtgagttaactcaaagccttttattatggaaagaactggcacagttacatttgccagtggcaacatccttaaaaattaataactgataggtcacggacagatttttgacctagttcctttttcttttagagcaaaaagaacttttacctcggcatccagcccaacccctaaagactgacaatatccttcgagctcctttgaaagcaccctaaacagccatttccattttaatagttggatgcggattgtacccttcaatctgaaagtcttcagctttgaagtcatcaattttctcaacttttcgaagaatcctgagctttgggaaaggtctgggttctcgctgaagctaaaaacaaaataaggccattattttgccataattgtacgacctgttgtaattgctcctcatgtccgtgaaacaagtacacaggatgtgatcaacaaagttctattttacaggagtatgatcctgtcgataccttgccgtaggttatgtaacatgattggagcgcaaccagctgttctcttgcacagatcgagagtgaggggtattttgtgacattacacagcatcaggagcctggtgcctcatcaggtgtaagttcttataaccactcttggcaaatttattaaagacaggaacacagtcaatctgtaactcatagtagctctacgtttacttgaattccacaatccctaacccatctgtccctggcagaaagaaggaaagatgacatgcatggacagtgaacagaaagggatgaaagccaggattcctgggatgaacagacagtggcaattaggatgtgaagacaggtcacaacctattactatgtctaaaaacgaccagagcagagagccagagagaataagcctgaagtcacctccactcaaaagcagccaaactccctcaaaggagtaacttttaaaacctggatctaacctggaaggggctaaaaagtgtctggttctgagtttttttccttaaggctcatgaagcagatgaacttacatttttattgccatttcatatcaattgttggctgctataacttagggatttcaacagacttttgaagtttggacctaaatattgtacttaatgtaaaattaacaaaaaatatttatggccagggtggtggcttatgcctgtaattccagaattttcggaggctgaggcaggtggatcacttgaagtcaggagtttgagactagcctggccaacatgatgaaaccccatctctactaataatacaaaaattagctgggtgtggtggcatgtgcctgtaatcccagctacctgggaggctgaggcagaagaattgcttgaacccgggaggtggaggttgcagtgagctgagatcgcaccacggcacactccagcctggccgacagagaaagactccatctcaaaaaaaaaagaaaaggaaaaacatttgcacttcaattctccttcaagttaaaatgagttaaaatgcccccttttggacaatcccctggcttgaatgtggctcttccctctctggtactggtgcttagtacctcacagcacctgacatgttaagtgcccatggttgctgaggcagatgcctgccttgtcctgcccacctgcccaccacttctccctaaactgaagccccacatttggagcagtcatctttatcttggacacagcattgagcagatgcctgttccacagtcaaccttttatcaagagaaggtaccaaacccaaaagtataacatctaattcttacctgaattttcagtggctcgatgtgattcaggtaaatatgtgcatctcccaaagtgtgtataaagtcacctggctataaacccgggggagaaagcagaacagtatgttagtttcaattctttaaaacatcatttaaaaacattagaatatgcagacaccgcaaggctttttttaaaaaaataatttagtgtagcttttccatttttttgtagcaacagcatcttgttatgttgcccaggctggtattgaactccagacctcaagcaattgctcctgtctcagtctcccaaagtgctgggattacaggcatgagccaccatacccaacctcagcatagcttttgagaaaatccatagaagctgtatcacaaacaacctgtatagatctgttagtgcgtataccacagggccagaaaaccttccagaagaggaaggtttcaaagtaaaagctggttcatttcttacttacacatatcaaatttaaaagctaatcagagactaaactctgcaatttgttttcccatattaaagaactgaagagctcagtgtggtaggctggcaagtcacccttcccgagacagcccaccttcaggcccgtgatgtgcgcaatcatgtacgtgagcagggcgtagctggcgatgttgaaaggcacaccgaggcccatgtctcccgatctctggtacagctggcaggacagctcactgttcaccacatagaactggcagagggcatggcatggaggcagcgccatcagaggaagatctgaggaaccagcagaggaagataaggagggatggtggtttgaaagaccacagctaaaggcaaagtaaaacaggagagaaacagaagccaactcatatggtggagaccaggagagagagccactgggctgcagtgatgtccataacagcctctgcagcgatggcacggagctgagggagactatccatcggtgcaaggtttctgcaggtgtccatttacggctgaagcaatgctcttccatcagagctgaagggatctgggctacctcgtggcaccagattacaaatacagcaggaataattctgtttgccacaggaaactggtgcttctggtacaccctcctatattaaaagtctctattacatggcaaaaaaaaaaaaaaaaaa

SEQ ID NO: 332 - DNA, 8564 bp, Homo sapiens
cttccggctgggcaaggggccgcggggagcagctcgggactgaaccgagaggtgccgaaggaaccggcgggccgcttgatcccgctgcagacgtaggagatgcctgggacaaggaggccaccttctcagggcaaaagaaaaagaaggtgacaggcgttgagaccaccgaagggaacccatggctaggatcagtttttcctacctctgcccagcctcctggtacttcactgtgcccacagtgagtccatttctccgtcagcgggtggcattcctgggactcttcttcatatcctgtctccttttacttatgttaatcatagactttcgacattggagtgcttcattaccacgagataggcaatacgaaaggtatttggctcgagtaggggagcttgaagctactgacactgaagacccaaatctgaattatggacttgttgttgactgtggcagcagtggttcccggatttttgtttatttctggccaagacataatgggaacccccatgacttgctggacatcaaacagatgagagaccgcaacagccaaccagtggttaaaaaaatcaagccaggaatctctgcaatggcagacactccagaacatgccagtgattaccttcgtcctctgctgagctttgctgctgctcatgtgcctgtgaagaagcacaaggagacccctctttacatcctctgcacagcaggcatgaggcttctccctgagaggaagcagttggctatcttggctgacctagtgaaagatttaccactggagtttgacttcctcttttcacagtctcaagcagaagtgatctctgggaagcaggaaggggtttatgcatggattggaatcaactttgttttgggaagattcgaccacgaggatgaatcagatgctgaggctacccaggaattggcagcaggacggagaaggacagtagggatactggatatgggaggagcctctctccaaattgcttatgaagttcctacctcaacctctgtccttcctgcaaagcaggaagaagctgccaagatcctgctggctgagttcaacctgggctgtgatgtgcaacacactgaacacgtgtacagggtttatgtcacaacttttctgggtttcggaggcaactttgcccggcagcgctacgaagaccttgttctgaatgaaactcttaacaaaaacagattgcttggtcagaagacaggtctgagtcccgacaatccatttctggatccctgcctgccagtgggactcacagatgtggtggagaggaacagccaagtcttacatgtccgaggaagaggagactgggtgtcttgtggggcaatgctgagccccctgctggctcgctccaacaccagccaggcctcactcaatggcatatatcaatcgcctattgacttcaacaacagcgagttctacggcttctctgagtttttttattgtacagaggatgtgttgcgcattggtggccgctaccatgggccaacatttgccaaggctgctcaggattactgtggcatggcttggtcggtactaactcagagattcaagaatggcctcttttcatcacatgcagatgagcatcgactcaaatatcagtgttttaaatcggcttggatgtaccaagtcttacatgaaggattccactttccctatgactacccaaacctgcggacagcccagctggtgtatgaccgagaggttcagtggacgctgggagccattctatataaaacacgattcttaccactcagggatcttcggcaggaaggtgtccgacaagcccatggtagctggttccgtctctcctttgtatacaaccactatctcttctttgcctgtatcctggtggtgctactggccatcttcctataccttctgcggctacgccgaattcaccaccgacaaacacgagcctcagctccattggacttgctgtggcttgaagaggtggtgcccatgatgggagtacaggtggggccgtgaggctggaccaggactagagaagcttgagcacccccgagttgctgctcattgaattcctccactttcttatatagcctcagatgctgtgatgtctgaccttgtggatatttgcccttggaatttctactttactttctaccgtaattccttctccgtacccaggtcttctctgagagaagctataatttaatctgtgaggaactaaatgacaggagattggtgctaatacgggggaccaagctttgtccaagtgaagcaggcttcgactccttctgagaggtctggtgtgttcctagaatctcaccttttcttcccttgctaaagcatgaagtttggcatttggcacactggaagcctggttgaaatgaaatttgtagcatctgatacaaagccagagacattctagcaagtgcagcagccccttctttctctgtaacagagatatcatttatgtggagatccacaacctttaacagggatccaagatctttgcagttcaatcgaccacataggaatttccaggcaccaaaatgatataacttccttgcttccttgacaaagaagccatcatgggtgtgatccaagatccctgtcgtagtgttgatgatgttagtacatgattttaaaggttagaaccccttctaaatgaatggtctgtggaagattttagtatcttatctgatgcctggtatgatgaggatagaaaatttttccatttttatgtgcctcacaggctgtttgggcattaattttgctttttgagccttaagtgtgttagtaggatggagaaactgtgatggggactgggaacctggatttgtctgattttaggtcactgttccctgggcctgtttttgtgagcccttacacaggaagatataaagagagttctttcatttcactgctaaaatcagtatgtagtatggggaatgtatttgggttgtttttaaagaaaaggggaacagaatcaggagagtgggcaaaggcaataaaatcaaagttcttattaattatttctgagaaatagaagtttctcaatttatgactcttggaatgtctgaaagggagcaaatttggaatagatcaatctgttaataagccatctggcaactttcagaacctctattaagagactgctgagtcacaaacagcacttccattaatgaagcgagaggaaaagccataataattacatcttcacccactacccttccagagctttgcttctcctccacatttagccattaaattgcatgaggatttctcttcatcagggtccgcatggaatctttcttatattttaccctttcctacatgtagccttgaatgtcctttccacgaatatgctcccacggctgggagcattttcttttcttttcgtcacctttgatttttgggattagattaataggggaaaaagtccctggctttaaagaaaacaaaagtagaattcttcaaaaataaatttcatactgggaacagaaaggaactaaatgcttcataaaacagggaaaaagaaattaagatcatcctagaaataaactaagataaaaataagtatactgacccttggttggtagataaaaagatgaccagtcttgtattgttttaaaattagataaacatggattaagcatgcaaagactctgttcctttttttttttcttggagacagggcctcacgctgtcacccaggctggagtgcagttgtgcaacatcatggctcaccgcagcctcaacctcctgggctcaaacagtcctcccaactcagactccagagtagctgggactacaggtgtgcgccaccacactcagctaattttttattttatttttttagagatggagtctgtgttgtccaggctggtctcaaactcttgggctcaagcaatcctcccacctcagcctcccaaagtgctgggattacaagcatgagctactgcacctgccctctgtttcctttggaaatctcttacctttcattagggtttctttcatagcaatttcctttggtttttaagacttctacattgctttttcttttattatctgtgctccgtgaaccttatgaatgctgcttaaaaataatgtcaaaatatgttttagctgcctactcaggtaacgttttcttttgctctcatcttggtttccatatactatttttggttttttgtgagatctaatcaatgatctagtcagaagctacttcactggctaacagtgatcatgttcatgtgctaaaaatgaacttgaaacacggaagtagtggttggtccagtttgaaagctcttattagtattcttcatcctggctgtaataatagccattatttgttatgcctttgttatgtagcagacactcttaaggattttatgtgtattattcaaattgctattactgttctttttatagttgagaatctcaggatacctacatttatcactttttcaatatatatgtatttcttattcttattttgtcttggagtgtttaatgtgttatttcctgttcattactttaatattatggtatctaggcttgtctttattaccatgagcaaggtctccaggagttccacagtactgaaggaaaattttgtcatatccctcagaagaactgaatatttattattggtatgggctcctttgtttattctcttctcccaattaatagattttaaatgaaatcttattagctagaaacaaaagccacttactccttgctgagagccaattacttaaatatatttcttccttataataaaataatttgcttctaggagcagaaatctatcttgccataccctttggtttttaaagatttctcttctatttgcatttctgcactttggtggttctcccatgaagataattatggtgtcataaaattcacattccactggttcctttgaatcttaccaaccactcttgttaacagagacaatgaacctgaactgttttaggactcttgttattactgagacaggtcacaaacatcaaaataggagtccgtggcttgtagtgatgctttttagtcttgtgatagcacaatccatcactttccccaaaattcttgtcatagaacataatgaaaaatatgtaaaatacccatttatgtggcatttcattcacttaagttgcagttaactctaagccaaattataccattttttctctctgtactttagctccttgaatttccttaatctgggaaacttttgttcccacaccaaggaacaaattcagggggtacaagtgcaggtttgttacatgagtatattgagtgatgctgaggtttggggtacagatcccatcaccaggtggtgagcatagtacctaacagatagttctttaatccatgccctcctctctccctccctgctctagtagtccacagtgtctattctggtctgggaaattttcatcactttccaccaatcttctatttattctccaaatgtcttccaaagtatcctgccccaccccctcctcatcctaagagattcctttaacttcaagatcatatccagtgattgctgaaaaatgtctgccatgcacttgctaagctagtgtttttaggcattaacatttattatcacatccatatttatatttttgaaataatttatacttctcactgatatcatctaaacagatgcttctcacagttttatgttttgttttttgtcagggatgaaagacaagtgagtggtatcacttaagggaaagaacagtaggcttaacgaatagcagacctggattctagttctggctttgtcatttactagctctggtaccccaggccagtcacttaccatctctggttcggttctcatctatcaaacaaagaggctagacaagattagaaactaaaggcagaagacaaggtagaaaaatcatatgattttgggaagagcattttgtcctttggtttagaagaccaggctgcccaaaagagcctcctattttatccataacccctgatgataaggttggtgggaacagagtttctaatagtaatcataataaatttcagaagagttttaaagcttctggtcaacccccttgatttatatgggtgataaaactgaggcctagagcagttgtaatatgtgcaaagtcatagtgactggcctcctagcccaactactttgtcagctacaatgaaatgctcattaacagaatctttctgcaagtataaacagaatctattttttataaaacagctggccacaactaaccatgccccatctttacaactgcttctgacattcatttatgactgctttgctcacatttaggaataaactttgaaaaaaatactttgtcagaaatagtgccaagttttcactacatctattcttgttcctgtatttcttttcgtacttttaaattttatacatctttttaaaacaattttatacaatttcctttactacaacatccaagcaattcattagatgactacagcctagatgaaggtataaatgcctattacatctacctcattaaagaacttcgttgtaattcttgggcagtttccagactctgttacagaaacagagggctgtttctttttgttgtctttaaacttttcaaattaattcaaaactagtatctaattgtcctttttgctgtggtatgtggtgtaatgttgattgggaataagaattatggtagaaatagcagatgtttcaaattctcccatattagtctcttagggacgctagctccagattccagcccctggggcaataacttgtgaggattttcctggtgttacaaaaaatattgctgttaaaaaactaagactcaaaaccaaaagttgtgattaataataacaggattattagtcaataatattttgattaatactatagaatagcaacagtgaatatacctcaaattgaaaacttttaggttgtgttcttggctcattctctcataacctggatctaagttggaaagctgtggcaccctgtttgggtgtcccatctaccctgttttctgtttctgcagatggcttgttcaagcttcattttaagcctgctctgtctacttatcttccttatatcctaatagacttctcttgtgttattacacatttctcttttgctctaatatttcattattttccagtttgtcagtaccgttatcagagggacgaggaaggaataacacaccagttgaccattttgtttctctgaaaatctgagcaatacggagatccttttattagtaaaactgaatcattactcatactacaagggctttcacttttaaaatgtaatccatcattgcttgccatttttatgaaaaccaaagttgaaaagtcttctgaatcacaggctatgtatagccacacatgcatgacttcaggctagcataaagacatgtctgctcctgagcctcttcttttaaagggcaaccacttgtataccctctggtggccactcctccttctccactccaaggcagccctggtactttcctaagtggcccctcctacagagcacttgccggcatttggcctgctgctggtgaagacgccccttactagcttcataaatgtttttctgcaagcagggatcccagacacatactttggtttctagtgtttcagttactatgttgtatttgaaattctcattccacaattaccctttagttgaagtcctgaagtacatgccatgtactccccctttatttctaccttgatcaatggcctctgcggagtgtagtgaaagacatctttttattatgatctacactttaaaaaaccaaaggctgcctgtattacattgctttggggagttgttaagactctgttttttctactgcttcacattaaacaataattttgttgaattttgaattcttaaaattctcactgacaaacattttaggtcagtgttgaggaaaatgtgtgatgcatgttagagaggtgatgcattctcccttatgcagggacatgggtatatgtgttacatatgctgatatataacccaccattcatcccaggaccacaagggtagctgtagataaactggttatcctaaaatcatgattatcagtgttgatctctgcaaccaacattgctttagggagttgctagtcattacccctgctacaatagatagtatttgtcagtctaagttacagacaaaaaattctaggttgactgattaagaaagccatgtgttttaatttccttcatgttttaaaaacaatggacgtaagtgcagagagacctttgaaaatattaagggaaatctatttaatcctataggtatgtgatgacttgtttttttggaaaaaggtatttggaacatcaatctgtaattatccattttccattcatgcattcactaattcaatatttgatatgtgtctgggagtgctgggaataacataaatacaaaaaaaaccctaagataatcattcaccagaagctcatagatataatacagttatatagctaaatgcaaccagttgtttttccaaatgtactcatcatctgtaataaaagaaaaatgaagtaaaacatctgaaaccttaacttaaaaaaaaaa

SEQ ID NO: 333 - DNA, 7439 bp, Homo sapiens
gcttgcgcgttagagatcgctgtccgctcttcctattggttcgtttttaggagctcggggaatacgaaatatccagccaataggagcagagatgccggaaccgggcttgtgtgcctctgctgaggtgatctggcgcagagcggaggaggtgcttggcgcttctcaggctcctcctctccccttgcggcctttctaacgttggccctgctcttgtggcctcccgcagaatgtggatgacgcccaaaagaagcaagatggaagtcgacgaggctctagttttccggcccgagtggacccagcgttatttggtggtggagcctccggagggcgatggggccctgtgcctggtctgtcgccgcctcatcgtagctacccgcgaacgcgacgtcaggcgccactacgaggctgagcacgaatactacgagcggtatgtggcggacggcgagcgcgcggccctggtggagcgtctgcgtcagggcgacttgcccgtggcctccttcactcctgaagagagagctgctcgtgcaggcctcgggctctgccgcctcttggccttgaagggtcgcggctggggtgagggggactttgtataccagtgcatggaggtgttgctgagagaggtactgcccgagcatgtaagcgtcctgcaaggcgttgacttatctccagatatcacaaggcagaggatcctgagcattgacaggaatctacgcaaccagctttttaaccgagccagggactttaaagcctattctcttgccttggacgaccaggcttttgtggcctatgagaactacctcctggtctttatccgcggtgtaggccctgagttggaggtgcaagaagatcttctgaccataatcaacctgactcatcatttcagtgttggtgcgctcatgtcggcaatcctagagtccctgcagacagcagggcttagcttgcagagaatggttggactgaccacgacccatactttgaggatgattggtgagaactcaggactcgtctcatacatgagagaaaaggccgtaagccccaactgttggaatgtcattcattattcaggatttcttcacttggaactgttgagctcctatgatgtagatgttaatcagatcataaataccatatccgaatggatagttttgattaagaccagaggcgttaggcgacctgaatttcagactttactaacggaatctgaatcagagcatggtgaaagggttaatggacgatgtctgaacaattggcttaggagagggaaaactttaaaactaatattctctctaagaaaagaaatggaagcgttcttggtttcagtaggggcaacaacagtccacttctcagacaaacaatggctttgtgactttggcttcttggtggacattatggaacaccttcgagaactcagtgaagaattacgagttagtaaagtctttgctgctgctgcctttgaccatatttgtactttcgaagttaagctgaatttatttcaaagacatattgaggaaaaaaatctaacagactttcctgccctcagagaagttgttgatgagctaaaacagcaaaataaggaagatgaaaaaatatttgatcctgataggtatcaaatggtgatctgtcgtctccaaaaagaatttgagagacattttaaggacctcaggttcattaaaaaggacttagaacttttttcaaatccatttaactttaaacctgaatatgcacctatttcagtgagggtggagctaacaaaacttcaggcaaacactaatctttggaatgaatacagaatcaaagacttggggcagttttatgctggattgtctgctgaatcctacccaattatcaaaggggttgcctgtaaggtggcatccttgtttgatagtaaccaaatctgtgaaaaggctttttcatatttgactcgaaaccaacacactttgagtcagccattaacagatgagcatctccaagccctgtttcgggttgccacaactgaaatggagcccggttgggatgaccttgtgagagaaagaaatgaatctaatccataaggctttgtagtacaagattgaaaaactcaacaagaatttaattctaaaagcaaaaattggtttgagttttcaagtttactaatttggattgtgagaaagtaccaagtaccagccgtccaaactgatcacaattaaaattctgacagttgccttttttttcatctcaaatggcagcatgggactgaaacatgagaatgccaccttttttaaaacttagtttagtgacaaagtcattgtcttttatgatatagttaattttaaagagatttagtattaatgtgagttgaatttgcagtctgttttttaggtgttctgaagataaatgccaaaaatttcagctcttattttaatggagtgttaaaattctgattcatatagtcttaaattatcaactccttaaatgtgcttttgaaccaatttgcagaagctcacatagcaagttcataagtttccaaaaaggaagcccatacataacagtggaggtgttttgtctaaccatcaaaatgtttgagacttttttttaaacatttctgagttcgaaggtaatactgacagatttcttccctcttccctccccatcacccacctcagtgataacacattactgatagaggaagtcattagaatcatttttaagtttcagatataggagacttcatgcaatttggagataagactaattattgggggttttccttggattttttttttaataactgggggctattttatcagcttgcctattaaaggactatggtaagtatagaatcttaatggttgccagttagtaattctttttttttttttttttactgtagacacaagtttggccctatcaaaaacgatgaggaaaaaagattgcactccaggattaggaggtgtgagatattttagcttttttgtcttatctgcgtgggtattgctgctttattttaaaaaatcctgcctaaagtaaacactttgttttaaaatgatacagtatcagattttgttagatgctagaaatggatttattctaaaatttggaactgtcgtacacattctatatgtaagatagcacacaagtagaaatatttaaaagcagtcttattcacagattgcagtaattctgtatttctactaagataatctgctttgtgccaaaacagtaatttccaaacttctgttcaccatgaaaaggcaatcttaaagttcattatgtaaaactaattataaacaggacccaatttatattcatagatcctctcaagtattatacaatttaaaaactcttgttccaaagtcctgtcttaactattgaaacaccttaatctgtggttactaatccagcaaattcaaggaaccaggctatgactaagaatttaggtggaattgatgtctgggcaattaaaataaatggcataagagcttaaaaaccaaagttgtgccagtggctttcaactagaggcagtaacctgtcattccagaggatgctgagaaatgtgtaggggcacttttttggttgtcatatttactaggggcttctgttggcatttaagcctaaagacactcacccctgcagtgcatgggacagcctggcacaatgaagaattagccctcccaaaatgtagattattttatttcaagggatagggcagattaccattagaagcaaaattaaaagtacaagctgggcaaactgacagaatactagataggagagactaattccaaccttctaaatttggctagtaaagtgcaataaaggcattgataagttctgttagctcaccatagcacttgtaaatcaggaattaataattgaatcagatttaagggctctgtcctgttatacatatttaaggcagaaaaaaagttacatgtcgattaggtacttatcaagaatggtcaagctgagattttggttaatagagtaagcttacatatctagagaaacaacatagtggaaaaccgaaaaaaaaaaacagaaaaatctaccggtaatttcccaatagctttgaatattcacagcagagctttattacttgagagaaagactggaagacctgaaagccacttctgctttctaaccccagttccttaaatattgaaatcttgtacattttgtgaaattccagtatgttttgcttaaggtgttaataaaattagtttgcatcatgtagtcattgagtgagggggagatataagccaaggattttaaattgacccttagctatagagaatttgctataagctagtcttgtttgtaaaaaaaaaaaaaaaaaaagaaaaagaaaaaagtgtattttactgttttctgtattaagtaattctgtaactgcatggcagtctttttttttttaaataaatatagttgttactggtcctgttgtagcagtgaatatagttaaaatacgtacattaaaaaaaaaattattaggtccttaccagttactgtcctatagctcattcctactagttttcttgacagatttgtattcccagtgtcccgtattgccactcaaattgctctactatgctaagtccttgttaatagtcttaccctccttgaaacacttgaacacttgatgactttagctttgaggagataccatctccaggtgtgctttcttagtctttgcaggcacctcttcccttcaatatctgttcttcgtatttttaaaaaaatttgttttagactgccttgttctgtgtcagctcgctagctgatctcatttccttccatggtttccttaccatttatatgcaaatgactgtcagattcatatctcctttctagatcttccctaattgatgtatctaattgctaacaaatgctctttgctgtctcaggcactacatgtcattgatcttgcccccaatcctgctcctcctctcatgtttcctctttgactaaatggcattaccactaccaaccattcatttgtcctttttaccaattctccaatgctgccattttaattcaggccatcaacctacctaaattatagcaacagcctccttattagtctccctgttttttatttttattcctttctacactacaaccaaattgctccaaaagacttactgatcatgtcactgcattgctttcaccattgctcttagggtacaatacaaatttatcttcatctttaaggtctcagtatgccacttcatctaggaaaccttcattgatgccctctagattaggtgcccttactatccattccctatacaccctgttctttcccagacatacacttggcacactttattgttactgcttattgatcactgctagactgtaagctttgtaagggcagggaccatataagccttgttcactgttatatctctagtgcttagcacaatgcctggcatttcaataaatgtttggacaaacgaatatttgtgtagtgttttacaatttttgaagctctttcacagtcttatttgaccttcacagtcattctgccttagactgtccattgggtaacttttatccacatattactaattgaaaaatgaagacaagttctttgtaactagggacctcgttgtattctcagaatttagtgtagtgcttagcatgtgacttaaatatgtattatgtgactgttaaacaaattgtggttttctctgttgtatgaaaggagagaaggataacaaattgcggttttccctggtaaacacagtaagtagtaaactcaggattcaaaaccaaatatacacaccaaatccactatgtaatattaagtttgcatatccatgtatagaatcttatttttttttaccctttgtaaacagtgtcatatatatatatatattttttttttttttttaaatttccaaaggaacctacatatagagggaaaagattagacaactacttagtgaactaaaacaatatgtttttactaaatgttacatttagtattggaaaaagataatgccgcctaagagttaataatcatttttccttttgtaggcatcaacactaggagaaaatggcatgctatttacttgctactttcctttacagatgatttttggctcttctgggatttaaaagtaagtaaatttaacaaagtagaagactgactcagcccttctggtcactatatattcagttcacttgtttttacacctgcagaatgtccttatcacccaaagggagatgacccaaaagtgacatctagttaatgtatacttctaaagtttgctgtattcctttgccttcttgttcccatgcctctctgaacttaatttctgggtaactgaggcttttcaggcttaggtgggaaagccacacccttagtctgtttccttaagccattttgaccaatttatgggattaactagtataatcttagttggagttttagtctgaggcatattaagtcattcagagatcttaacagtaggtgtcatagtcatccagtgatttggtgcttgctgcaaaactggcttttttttttttttttttttttgaggcggggtctcactttgtcacccaggctggagtgcagaggtacaatctcagctcaatgcaatctctgccttcctggctcaagcaattctcccactgcagcctcctaagtagctgggaatacaggtatacacgagtacacccagctaatttttgtatttttatgtggagacagggtcttgctgtattccccaggctagtctcgaattcctggactcaagcagtccgcccgcctcgggctcccaaaatgttggtgttatacgtgtgagcctctgcacccggcggcaaaactggcttttaatcaaccttttggctaaaggatttctctttttatttatttgtaaaaggatttcccatttttatctttctttttgatattaaaatgttgcctcatcctacccagtaagtacttgaatttgaattctcttccttttcatttttgcctgcaaactgaccagtcttttctgagttcatctcttctgtacgttttgtcaagtgcagtgaacagcaactacaaaatattttgtttttctgtctttttctttagtaaagggtagatgatctgcctttcaggttatctcaaggggcagtttcacctttccataatataaattacccttgtgtaagttatttcttccatcttctgatagcaatttcctgaatgcctgccagctaaccattaagccagtgttcagtattttagcattttaaaaaacaagggaccaatttctgtgtcagcatgggctagcttgccattgaataacaaaggcaaaatctcactgtctcacacaacttttctattgcaacttgcctagggactttggtttagatcataggttggccatgatcaaactatggtccatgggcaaaatctgtctagctccttatttatctaaataaagttttactggaatata

SEQ ID NO: 334 - DNA, 4628 bp, Homo sapiens
tcacttgcctgatatttccagtgtcagagggacacagccaacgtggggtcccttctaggctgacagccgctctccagccactgccgcgagcccgtctgctcccgccctgcccgtgcactctccgcagccgccctccgccaagccccagcgcccgctcccatcgccgatgaccgcggggaggaggatggagatgctctgtgccggcagggtccctgcgctgctgctctgcctgggtttccatcttctacaggcagtcctcagtacaactgtgattccatcatgtatcccaggagagtccagtgataactgcacagctttagttcagacagaagacaatccacgtgtggctcaagtgtcaataacaaagtgtagctctgacatgaatggctattgtttgcatggacagtgcatctatctggtggacatgagtcaaaactactgcaggtgtgaagtgggttatactggtgtccgatgtgaacacttctttttaaccgtccaccaacctttaagcaaagaatatgtggctttgaccgtgattcttattattttgtttcttatcacagtcgtcggttccacatattatttctgcagatggtacagaaatcgaaaaagtaaagaaccaaagaaggaatatgagagagttacctcaggggatccagagttgccgcaagtctgaatggcgccatcaaacttatgggcagggataacagtgtgcctggttaatattaatattcccattttattaataatatttatgttgggtcaagtgttaggtcaataacactgtattttaatgtacttgaaaaatgtttttatttttgttttatttttgacagactatttgctaatgtataatgtgcagaaaatatttaatatcaaaagaaaattgatatttttatacaagtaatttcctgagctaaatgcttcattgaaagcttcaaagtttatatgcctggtgcacagtgcttagaagtaagcaattcccaggtcatagctcaagaattgttagcaaatgacagatttctgtaagcctatatatatagtcaaatcgatttagtaagtatgttttttatgttcctcaaatcagtgataattggtttgactgtaccatggtttgatatgtagttggcaccatggtatcatatattaaaacaataatgcaattagaatttgggagaagcaaatataggtcctgtgttaaacactacacatttgaaacaagctaaccctggggagtctatggtctcttcactcaggtctcagctataattctgttatatgaggggcagtggacagttccctatgccaactcacgactcctacaggtactagtcactcatctaccagattctgcctatgtaaaatgaattgaaaaacaattttctgtaatcttttatttaagtagtgggcatttcatagcttcacaatgttccttttttgtatattacaacatttatgtgaggtaattattgctcaacagacaattagaaaaaagtccacacttgaagcctaaatttgtgctttttaagaatatttttagactatttctttttataggggctttgctgaattctaacattaaatcacagcccaaaatttgatggactaattattattttaaaatatatgaagacaataattctacatgttgtcttaagatggaaatacagttatttcatcttttattcaaggaagttttaactttaatacagctcagtaaatggcttcttctagaatgtaaagttatgtatttaaagttgtatcttgacacaggaaatgggaaaaaacttaaaaattaatatggtgtatttttccaaatgaaaaatctcaattgaaagcttttaaaatgtagaaacttaaacacaccttcctgtggaggctgagatgaaaactagggctcattttcctgacatttgtttattttttggaagagacaaagatttcttctgcactctgagcccataggtctcagagagttaataggagtatttttgggctattgcataaggagccactgctgccaccacttttggattttatgggaggctccttcatcgaatgctaaacctttgagtagagtctccctggatcacataccaggtcagggaggatctgttcttcctctacgtttatcctggcatgtgctagggtaaacgaaggcataataagccatggctgacctctggagcaccaggtgccaggacttgtctccatgtgtatccatgcattatataccctggtgcaatcacacgactgtcatctaaagtcctggccctggcccttactattaggaaaataaacagacaaaaacaagtaaatatatatggtcatatacatattgtatatatattcatatacaaacatgtatgtatacatgaccttaatggatcatagaattgcagtcatttggtgctctgctaaccatttatataaaacttaaaaacaagagaaaagaaaaatcaattagatctaaacagttatttctgtttcctatttaatacagctgaagtcaaaatatgtaagaacacattttaaatactctacttacagttggccctctgtggttagttccacatctgtggattcaaccaaccaaggacggaaaatgcttaaaaaataatacaacaacaacaaaaaatacattataacaactatttacttttttttttttctttttgagatggagtctcgctctgttgcccaggttggagtgcagtggcacgatctcggctcactgcaacctcacctcccgggttcaagagatcctcctgcctcagcctcctgagcagctgggactacaggcgcatgccaccatgcccagctaatttttgtatttttagtagaggcggggtttcaccatgttggccaggatggtctcaatctcctaaccttgagatccaccctccacagcctcccaaactgctgggattacaggtgtgagccaccgcacgtagcatttacattaggtattacaagtaatgtaaagatgatttaagtatacaggaggatgtgaataggttatatgcaagcactatgcccttttatataagtgacttgaacatctgtgcccgattttagtatgtgcaggggggcgatctgggaatcagtcccctgtggataccaaggtacaactgtatttattaacgcttactagatgtgaggagagtctgaatattttcagtgatcttggctgtttcaaaaaaatctattgacttttcaataaatcagctgcaatccatttatttcatttacaaaagatttattgtaagcatctcaatcttggtttgtcagtttatcttaagcatgtcaattcataaaaacaagtcatttttgtatttttcatctttaagaatgcttaaaaaagctaatccctaaaatagttagatctttgtaaatgcatattaaataataaagtatgacccacattactttttatgggtgaaaataagacaaaaataatagttttagtgaggatggtgctgagtaaacataaaaactgatttgctctcagctgatgtgtcctgtacacagtgggaagattttagttcacacttagtctaactcccccattttacagatttctcactatatatatttctagaaggggctatgcatattcaatgtattgagaaccaaagcaaccacaaatgcataaatgcataatttatggtcttcaaccaaggccacataataacccagttaacttactctttaaccaggaatattaagttctataactagtactcaaggtttaaccttaaaattaagatttccttaaccttaaccttaaaattgatattatattaaacatacataatacaatgtaactccactgttctcctgaatattttttgctctaatctctctgccgaaagtcaaagtgatgggagaattggtatactggtatgactacgtcttaagtcagatttttatttatgagtctttgagactaaattcaatcaccaccaggtatcaaatcaacttttatgcagcaaatatatgattctagtgtctgacttttgttaaattcagtaatgcagtttttaaaaacctgtatctgacccactttgtaatttttgctccaatatccattctgtagacttttgaaaaaaaagtttttaatttgatgcccaatatattctgaccgttaaaaaattcttgttcatatgggagaagggggagtaatgacttgtacaaacagtatttctggtgtatattttaatgtttttaaaaagagtaatttcatttaaatatctgttattcaaatttgatgatgttaaatgtaatataatgtattttctttttattttgcactctgtaattgcactttttaagtttgaagagccattttggtaaacggtttttattaaagatgctatggaacataaagttgtattgcatgcaatttgaagtaacttatttgactatgaatgttatcggattactgaattgtatcaatttgtttgtgttcaatatcagctttgataattgtgtaccttaagatattgaaggagaaaatagataatttacaagatattattaatttttatttatttttcttgggaattgaaaaaaattgaaataaataaaaatgcattgaacatcttgcattcaaaatcttcactgac

SEQ ID NO: 335 - DNA, 2089 bp, Homo sapiens
agtttggacggctgcttcccaccagcaaagaccacgactggagagccgagccggaggcagctgggaaacatgaagagcgtcttgctgctgaccacgctcctcgtgcctgcacacctggtggccgcctggagcaataattatgcggtggactgccctcaacactgtgacagcagtgagtgcaaaagcagcccgcgctgcaagaggacagtgctcgacgactgtggctgctgccgagtgtgcgctgcagggcggggagaaacttgctaccgcacagtctcaggcatggatggcatgaagtgtggcccggggctgaggtgtcagccttctaatggggaggatccttttggtgaagagtttggtatctgcaaagactgtccctacggcaccttcgggatggattgcagagagacctgcaactgccagtcaggcatctgtgacagggggacgggaaaatgcctgaaattccccttcttccaatattcagtaaccaagtcttccaacagatttgtttctctcacggagcatgacatggcatctggagatggcaatattgtgagagaagaagttgtgaaagagaatgctgccgggtctcccgtaatgaggaaatggttaaatccacgctgatcccggctgtgatttctgagagaaggctctattttcgtgattgttcaacacacagccaacattttaggaactttctagattatagcataaggacatgtaatttttgaagaccaaatgtgatgcatggtggatccagaaaacaaaaagtaggatacttacaatccataacatccatatgactgaacacttgtatgtgtttgttaaatattcgaatgcatgtagatttgttaaatgtgtgtgtatagtaacactgaagaactaaaaatgcaatttaggtaatcttacgtggagacaggtcaaccaaagagggagctaggcaaagctgaagaccgcagtgagtcaaattagttctttgactttgatgtacattaatgttgggatatggaatgaagacttaagagcaggagaagatggggagggggtgggagtgggaaataaaatatttagcccttccttggtaggtagcttctctagaatttaattgtgcttttttttttttttttggctttgggaaaagtcaaaataaaacaaccagaaaacccctgaaggaagtaagatgtttgaagcttatggaaatttgagtaacaaacagctttgaactgagagcaatttcaaaaggctgctgatgtagttcccgggttacctgtatctgaaggacggttctggggcataggaaacacatacacttccataaatagctttaacgtatgccacctcagagataaatctaagaagtattttacccactggtggtttgtgtgtgtatgaaggtaaatatttatatatttttataaataaatgtgttagtgcaagtcatcttccctacccatatttatcatcctcttgaggaaagaaatctagtattatttgttgaaaatggttagaataaaactatgactctataaggttttcaaacatctgaggcatgataaatttattatccataattatagtaataataaccttaataagcataagaaaaacagagtcactctggatttcaaaaatgtcaaaaaatgagcaacagagggtccttatttaaacataagtgctgtgacttaggtgaattttcaatttaaggtagaaaataagtttttaggaggtttgtaaaagaagaatcaattttcagcagaaaacatgtcaactttaaaatatagtttattttcatatttttttcttttaaacttggttgataagtggaattaggagtatatttgaaagaatcttagcacaaacaggactgttgtactagatgttcttaggaaatatctcagaagtattttatttgaagtgaagaacttatttaagaattatttcagtatttacctgtattttattcttgaagttggccaacagagttgtgaatgtgtgtgggaaggcctttgaatgtaaagctgcataagctgttaggttttgttttaaaaggacatgtttattattgttcaataaaaaagaacaagataca

SEQ ID NO: 336 - DNA, 4341 bp, Homo sapiens
aaaccaataaggttaggacaagagaatagctgtggtttgcgttgcaaaaaccaaaaaaaaaaaaaaaaaaaaaaaaagaaagccccgaggctccatgggcagacctacaaggctgcgcaaacaaatcgagggatgagattctgctgtttctttgtctagggttctcagatgctatctgccgctgctgtttggtggggaaggagcgctgggcgcaaagctgttaccaaacagaacggtgggagctgatggctccgagtttggggcgaggtagaaactctccagtgccacttccgactttaagccttcctgttgccgtccactgtggcgggtttcttcctggggaacacgttttcgctcagtcgctcggcagcccgagcctgcggcagcggccaggcgcctgccccctgcgccgagctttcccctgcagaggcgctccactcccagaagcgccgcggctgcaccagagcgcctgagagcccccgcgcgtacccatccaggagcaaaactatgtcaggaatggaggtttgctaacccagaaaattcgaaggaacacattaaactggtggatgcagcagatgtaagcgctgtgcaaacatctcaagccagttcagatgttgctgtttcctcaagttgcaggtctatggaaatgcaggatctaaccagcccgcatagccgtctgagtggtagtagtgaatcccccagtggccccaaactcggtaactctcatataaatagtaattccatgactcccaatggcaccgaagttaaaacagagccaatgagcagcagtgaaacagcttcaacgacagccgacgggtctttaaacaatttctcaggttcagcaattgggagcagtagtttcagcccacgaccaactcaccagttctctccaccacagatttacccttccaacagaccatacccacatattctccctaccccttcctcacaaactatggctgcatatgggcaaacacagtttaccacaggaatgcaacaagctacagcctatgccacgtacccacagccaggacagccgtacggcatttcctcatatggtgcattgtgggcaggcatcaagactgaaggtggattgtcacagtctcagtcacctggacagacaggatttctcagctatggcacaagcttcagtacccctcaacctggacaggcaccatacagctaccagatgcaaggtagcagttttacaacatcatcaggaatatatacaggaaataattcactcacaaattcctctggatttaatagttcacagcaggactatccgtcttatcccagttttggccagggtcagtacgcacagtattataacagctcaccgtatccagcacattatatgaccagcagcaacaccagcccaacgacaccatccaccaatgccacttaccagcttcaagaaccgccatctggcatcaccagccaagcagttacagatcccacagcagagtacagcacaatccacagcccatcaacacccattaaagattcagattctgatcgattgcgtcgaggttcagatgggaaatcacgtggacggggccgaagaaacaataatccttcacctcccccagattctgatcttgagagagtgttcatctgggacttggatgagacaatcattgttttccactccttgcttactgggtcctacgccaacagatatgggagggatccacccacttcagtttcccttggactgcgaatggaagaaatgattttcaacttggcagacacacatttattttttaatgacttagaagaatgtgaccaagtccatatagatgatgtttcttcagatgataacggacaggacctaagcacatataactttggaacagatggctttcctgctgcagcaaccagtgctaacttatgtttggcaactggtgtacggggcggtgtggactggatgagaaagttggccttccgctacagacgggtaaaagagatctacaacacctacaaaaataatgttggaggtctgcttggtccagctaagagggaagcctggctgcagttgagggccgaaattgaagccctgaccgactcctggttgacactggccctgaaagcactctcgctcattcactcccggacaaactgtgtgaatattttagtaacaactactcagctcatcccagcattggcgaaagtcctgctgtatgggttaggaattgtatttccaatagaaaatatttacagtgcaactaaaataggaaaagaaagctgttttgagagaataattcaaaggtttggaagaaaagtggtgtatgttgttataggagatggtgtagaagaagaacaaggagcaaaaaagcacgcgatgcccttctggaggatctccagccactcggacctcatggccctgcaccatgccttggaactggagtacctgtaacagcgctcggcactttgacagcgcacagctgctctgtgaccagggacagatccagcaggccccagtctcgcatcagcgccggcctccagaacttagcaatttccgcctggtgatgcgcagttgctgtcagtcttgacctctgcctttgtggtgaatggaggaccacgtctatttcatcagaacagctgttgactctagtactgtgaatccagtgaaaataagccatgagaatgttttagcacagcgttatgtgtctgccacattaactacacggttcaaacctgtgaagaaaggacctgcaaacgcttcagttgttagcattttcaatgtgatataaacagcttctccaatacagcaaacctaattgcacaacagagactgaaatgtgtttcctgaataccagtggaggaattttcttgtaaagaaggtttactttttggtgtctcatacccagggtaatctgtacatctctacttatttatgaacagactttttttaaaaagataaaaaaacagctttattgaggtataattcacccaccagacttttttaaacatcaaataattgaagagacaatagcattagaaataagtgattaaaggcctctgcctcacaacatggcaagtacagtactttgaattttagcacattgcatagtagttttaagtatgtctaatttaaacgtataatatgtacatcactgagacaatcatgtacagaaagaatttttggtgtaaatttgtaataatggataattcttttacatattgtttagggaaatgatattgaaaggtagcaatgcctggatagtgaagcatgaggcagcacgtgcacaaattcatgtgccgtgccttatctgagttttcggtataaatatgtagataatggattttttttttttagataatgttgtcaagaccaaaagcatggatgtcaagtgtcagtaaggattttgttttctaaaattttttcctgcatcagttcttctgagggccttgatgaaataacacagcagtttcttaaacaatttgaaacaaaatgagctctcctaccacctcactttttcatttccacactaatgtattatatgtaactacttggaaaaaataattattcaaatgcttcttcccacaaagaatatagatgatagtagatatattttattaataaaatggttcatgaatcggagactaacaaagttttcatgtgctcagaattattaattatcgtgtctgcattttctttcgataaaggaagacacacgatgctaatccggaaatcagcaaactttgcattactccctatgtgcgtattttctctttcttcctgtcaccctgaggaaggttcattgccattgtcatcaccatggaaacaacgttcctctccacctgcattatgtactacatgacaggcatcaatctggggaaataataaaattatcacctttgtcagaccataagagtttctccaaaagtggtcagtttggctgggcaatattttctctcatctaacaaacacaatccattgtcatgaaattacccttaggatgagtcttctttaatcaatcatatattgggcggaaaaaacaccagctttgacccgaagtagttgaagagctacttcattcttttctgaagttgtgtgttgctgctagaaatagtcatttgtgaattatccaaattgtttaaattcacaattgaattagttttttcttcctttttgcttgaagcaaacagttgacaatttttaaccttttcattttatgtttttgtactctgcagactgaaaagacaaagtttatcttggccttactgtataaaggtgtgctgtgtccaccgttgtgtacagaatttttcttcattaattttgtgtttaagttaataaaatttatttgtgatgtactgtaaaaaaaaaaaaaaaaa

SEQ ID NO: 337 - DNA, 7981 bp, Homo sapiens
gcccagatcgtcgcctatcctgcttgcgcagccgctatcgcgtctgcccaccgacgaagcatgggtgtccagggcttccaagagttcctggagaagcgctgtcccggggccgtggtgcccgtggacctcctaaaactcgcgcgcacggtctcgcgccagcagcagcagcagcacttgcaccgccagctgccgccgactgcagccctagcgcccggggctccacgcgccgccaggggctccgtgcctctgcaaccgccgcttccgcccgctgccttgggtgcctactccgggggcgcggggccgactcggcaccatcaccccgctcaccacttccaccatcatggccaagcgcagcccgggctgcaccctccgctgccgccgccgccgccccctcagctgcccggggcccgggtgctggtggacgccggctcggcgctgccgcggctctatggcggctaccagacggattgggtgtgtggcggccaatggaacgccatgctgggctacttgtcagcgctgtgccaggcttgtgcctatcctggcggcgacggcctggagctcgtggtcatgttcccggggggcctgggcaaggaccggctggccgagtggggccgtcggtgccaggccgagcggcagacagcgcaactgatcgtgggacacgtgggcaacaagggcacccctccaccgcgggcctggttcctgccaccggcctgcctgagccactgcgtgaggctagcactcatccgcttccgggtcaaggtctttcagagccttgaagaccaccatttggaagtggtggcgtttttcagggaaaatggcttccatggccttcttgcccatgactccgagtatgctctctacaatattccctcttactacagttcccatgctctgaaactgagctggaatgggaagaacctcactaccaaccagttcctgatgcaagaagtagccaagcagctgggcctgaagaggatgaatttccccatatttgctgcactgctaggtaaccacatcctcccagatgaggacctggctgcttttcactggagcctcttgggaccagaacatcctcttgcatcacttaaggttcgagctcatcagctggttcttcctccctgtgacgtggtgatcaaggctgtttctgagtatgtcagttccatcaaagatccctcaaacctggatgtagttgggaaggatgttttcaaacagtctcagtccaggacagaagataaaatagagcgattcaagaaagcagttgagtattattcagtcacaaccaaactctcttcgctgccagtgggtccctcctttctaggttttcggaataataggcttggaaatcctccccttccacgaaatcaagtgggcaccatttctgctggaaagccaatgttttctcatcaagtgccccagaaagtgaaatatccaccaccattcccagtgggacccaactcatctcttctcttctcctcccatgctttgggggaatcccatgctttttctgaggatcccatgctgcagaacagcccctttgccaattgggctgtctcctatgactcttctgcatcccagtttcccaattacctgccttctaaagcctcacctcctttgggaccagactcttcccactcctcttcctctgatggtgatgagccaaatggagctagctctgatcatatcacagaagcatttcatcaccagcctgagtggggaaatcccaatcgtgacagagggtcctgggcacagcctgttgatactggagtttcagaagcgagcctaggtgatggtgagccccacatcccatctctgctgtctatgtctacaaggaaccacatggatatcaccattccacccttacctccagtagctccagaagtcttgagagttgctgaacacagacaccggaggggtcttatgtacccatatatctaccatgtcctcactaagggtgaaattaagatccccgtatgtattgaggatgagtgtaacatggagctgcctccagctgctctcttattccggtcagctcgtcaatatgtatatggagttctttttagtctggcagagacacagaggaaaatggaacgcttggccatgcgacggcggctgcctgtggaagttccttcagtgatccttaaagagtggtctgcctataaagggaagtcacctcaaacccctgagctggtgtctgcactgacatttcgggaatggacttgcccaaacctcaagaagctctggctaggcaaagcagttgaagacaagaacagaaggatgcgggccttcctggcctgtatgaagtcggacacgcccagtatgctcaatccagctaatgtccccacccatctgctgctcatgtgttgtgtactccggtacatggttcagtggcctggtggccgaatcctgcatcgccatgagctagacaccttccttgcacaggcagtgtctacccagctttatgaaccagatcgactccaagaactcaagattgagaaactggatgcccgagggatccagcttgctgccctcttcatgagtggagtcgacacagctctgtttgctaatgatgcctgtggccagccagtcccttgggagcattgctgtccatggatttactttgatggcaagctgttccagagcaagctaattaaagcaggccgagagcgagtatctctggttgagctctgtgatggccaggctgacctggcaaccaaagtggaaaagatgagacagagcatccttgaaggagtcaacatgaatcatccaccgccttctgctctacttccgtcacctacttttgtgcctcccatggtgccctctctctaccctgtttcactttattcccgagctatgggctccatgccacttccccctcaagggaggagccggggatttgcaggtctccatccaatcccaccccaaggaggaaaactggagattgctgggatggttgtgggccagtgggctggcagcagatcctccaggggccgaggatccttcggcatgcaagtggtttctgtcggtgggccaggaaaggggcatggaaaagaacagactggtagaggatccaagggacacaaaaaaggaaataagcaaggctcttcagatggagtttctaaatccctggagcttcatcaaggtcggtctcgctcccaggtaaatggaaacagtggcgcattgatcaaggaagagaagagtgatcatcgtcttccagctccatcacaatgtgccttatccagagacagcaatgagtgtaataatggtaaccgctacctccctatgaataatagggagaagaaccacttacaagagcaaaagctagaaactgtggcacaacggaaagaggactgataagctgaagatggcttcaccaaaccaggaagagggaaaaacttttacttttctgattttaggcccaagctagaggaggatataaatgcttaccctagatttctccaggattttggtgggatgtcctattgtgtccatcttttccccttccctgcctgtttctgggacttcagattcagtggtctgtttctggagaagttctggtcaaagatgaatggcagtaagactaggtcctagtctcaaattgaagatatagcaccaatagtttatttatctcctctgggagcctagtaaggcagtagctgtcagaaattgggtatcatcacataaggtcctatagaaaagctctagctttggtttttctgagcatttataatgatactcattatcaaagacttatatgataaacctatgaggttgtggggacagctgtggcctcctgaggtttttttttgttttttttttttctctatgaagtggtatctacctcttcttcactccttccaacttacctacccctggattttgtaccaccacctctagctttggcctgacaatcagataggtagatgttttcagaaaagtaaggtagtattggttattttaatttttattttttattttatacacttcaaaaaaactatcaatggcctttgtactgggggattcaagtgaatcagaaaagtactgggcagatttttcctgcctctcaaccagtgcattgtttgtaaaatagaagatgtggcacagttcattcactccctattgcccacaccatgaaagggtgggaatcagtgtaatgaacttgagtacgaaagggactcaagagactgtgtgtgtgtgtgtgtgtgtgtgtgtgtgtgtgtgtgtgtgaatgtgtgcttgtgtgtgggtgtgggtggatgttgtgtgggtgggtgtatatatgaatgtgtgtatatgcatacacataccctttatataaagagacagatctatttatctatacatattttatatatatgtaagtgtgtgtgtatgtgtgtatatatgtgtgtatatatatatacacacatatatacacacatacatacatacatacatacatacatacatacatggtgatgtcccagaggatttactcaatttcccagaaatgcttccactgctatggagtggaaggtttcaaaagaccacacttttaatctgaaattcttactaagtcacagtgcattcacaactatgagaagttggatgggcttctctaaatcagacaaaaagtactttccagaaattgcctgttcagaacaataaactcttgggttgttacaagcttaatcttgaacagagccctcacatcccatatggtgaaaacaggaggttggaatgggattgggaagagttgggcatttccttatgaaggtttggagagaaaaggggggatgggaggtgactaccatttgaaagggctttcagccaatttggaggaaatctcttctggaactccagggtcaaattggtttcaggctagaattgattgacatgaatccctgaaggagagaggactagctttggaaagatagggtagggaagtgtgaggaaactatttgattttacacgcctagattgtttcatttgttcattgacattctgactactggatcttttcatttgctttgcaaggaagactttagaggactctggcctgggccttgagaagaattctattaaaagattctcagcctcctgtgtggccaggatctgcccaggataaagaggctattcctccttgctggagataatcttgagacaaccttgcatttccagtttccctccttgggcagcctaactatgagggagggaaacatggcttgcaataaattagcattgtgtcttcattcaggaattgaggcttccagcctcatatacctccttttgggctttgtgatattcttgcccaagaagtaccatttctacagaaatacaactgactaatcttctagcagggttctttttgaaaaaccccatgcaccttaacccacagcaggtccttggtgatttttgcccagacaaccagaaggctatttgcttactgcccacttacaatgaccagatcataggaaattgaaaacagtgtcagactatttagtcctaatctgtcccagattaagagaatccatgattttcagggggagggagccctgcaatgccttgacccctgcccagatacttcttacataaaccaaagaaaaatgacaagagtgtacatctaaccagacagaagtagaaacaaagtatagaaaaacctcctctttggaatcagctcccttaatgtggtcccccttctcttggacctgcccaacctttcacaacgtcttgaaggtaggacttctatatccagcaaaggaagggatagtagtaaatttacatggcttggaattttctttctggagccacagagggatgaatcctttggagctctaaaagcaaccagtatcactgagctgtgagatacctatatctccattttctaataggaagcacttggacttaaaattgctaagatattttttgcagttgctatttctgtgcatcttgaatctatctgacacaatcaaatgacagtattgttaactctcacaccattaagaaaatttcttattttgtaggcattcactgtgagaggtaaaattgctgctttggcaggtatgattccagtttgccaaacggcttttcttccttccacaacctctttttcccctagcccagggtgaaacaagtgggtcatctccaaccttgatttttatttggattcagcattttgggtttggaaggttacaagaaggaaccataaatggccatattcctagatttttatttatctgacaaaatacacaacttaaaagccaggaaaactaaggttcattacagggagatgaactttttctaattggaggacaaattgtggaaggtggggtctgatctttgcttcaccacttgaagagactgtcatccttcacctgaggttccatttctagcttttatgtgacctctcttgaacaaagtcatttgggaacccccagaaatgacccctttacattgtaggaccataagcaaaacactggttgtgtatagtcactgatccccaaggacttgcagttttttatttctgctggtgtgtcttgggatcagcttataactcctactcttacttagtcagtgaccagtccagtctggtctggaccaggcctgacaaacttctgctcacttgcatcattttcattctgagccagtaggactttgggtagactttaaagcccaagaattggtactcgctttggctagtgacatttgatttttgtctccatcttgatttctgacatcattggccaagtcacattaactttttttgatcactgagaaaaacagtcgaacaaggcattacagagggtggttaaggtagagggtggggggcaggaatgcttatgtaggatagaaagaatgtgggggtagctgtttggttatggtgatccagtcctttggaaccttacaaggctcctgtgggcatgtcaatgttaccattacagcctctacgacccacccacctttgaaaagtcagtacaagtagaccacagtttaaagtagttagtataattctactaaggtttaatcattatacttgttcacttcctggtgcatatttcctaaatatgcttggggtgtggggtggggggttgagttttcactgttccattgcgtgtcatcttatatttttctccatcctgtgactttggcatcttactcgactttctattttcttttcccttggcttattgcagtagtctgctggtgcaggtagagagctcagtgcacctattcccctgttactgctaattatcttgaatattgtcagaggttattttgatgttctaagaatataaagtcattttttacaaaatcatcttttccaagttaaaagcaaaataaaaaaatcccctgtgctagggtgcccatttcagcttttgacattgcccctgtacttttatagatgctctttttgtccgtgttggtagtaactaatgactagtgaattttcatgtaaatgaagcaaaataaatatttcagattttattaatctctcataacccagccaaatctgatgacttcattttaattgcttcccagaaagcacttcccctcctaccttctattctattctattctattctattctattctattctattctattctattctattctgttctattctgttctattctgtttttagaataacacactaggtaaagaaactttaactgcaaggagtcagtgacttttagtgctccctgataaatgatgttattgacaaaagtaaaaaattatttcattgtttttttcctgtattactatctcctctcctgtgcttttgacagtgtgtttagtggatggataatatgtatttctctttcccactcccagattccaaattccctgcctttttggcccacctcaccacaaaagctccatagtttattaatgtaagtttgaatggatgcttctttggggaaacttcaggagttaatggaagagtttcagaaaggaatgagaatgcctcaggagttgttctgtgatggaaattggtctgtt

SEQ ID NO: 338 - DNA, 9348 bp, Homo sapiens
agttggcaggctgctgcgggaggcggcggcggtaggaagccggagacagcagggtgacagaattggaaaatatttaactcttaacaaatgaattccccacttgaactctgccgaattcctgtgccacctcctcctttagaaaactgatcttaatacagagataaaagaggagtagaaggtaaaagaaaatgctgggaactgaccgttgtgttgtggaagaatggttatcagaattcaaggcattacctgacactcagatcaccagttatgcagcaactttacaccggaaaaaaacacttgtaccagccctctataaagttattcaagattcaaataatgagctcctggagcctgtctgccatcagctgtttgagctctatcgtagctcagaggttcgacttaagaggttcacactgcagttcttgccagaattgatgtgggtttatttacggcttacagttagccgagacagacagagtaatggttgcattgaagcacttctgttaggaatttacaatttggaaatcgctgataaagatgggaacaataaagttctgtctttcactatcccctccttatccaagccttcaatataccatgaaccttcaacaattggatccatggctttgacagaaggggcattgtgtcagcatgatctcatcagagttgtttatagtgatcttcatcctcagagggaaacattcactgcacagaaccggtttgaagtcctgagttttctcatgctgtgttataattctgctattgtatatatgcctgcctcatcttaccaatctctttgtcggatgggttccagggtttgtgtgagtggctttccacggcaacatgaaaaacactggaaagaactctgtggtcgaatagtattggatcctgaatttatggtgcaacttctcacaggggtttattatgccatgtataatggacagtgggaccttggccaggaagttcttgatgatatcatttatagagcccagctagagcttttttctcaaccactattggttgccaatgccatgaaaaactcattaccatttgatgctcctgattctacacaagaaggccagaaagtccttaaagttgaagtcactccaacagtgccgaggatttctcggactgcaattacaacagcttcaatccgtcgtcatagatggagaagagaaggtgctgagggtgtaaatggaggagaggagtctgtaaacctgaatgatgcagatgaaggattttcatcaggggcttccctcagcagtcagccaattgggaccaaaccatcctcctcttctcagaggggaagcttaaggaaagtagcaactgggcgttcagccaaggataaagaaacagcctctgccatcaaatccagtgagagccctcgagattcagtagttcgcaagcagtatgtacagcaaccaactgatcttagtgtagattcagttgagctgacaccaatgaagaaacacctgagcctgcctgctggccaggtggtgccaaaaatcaatagcttaagtctaatccggacagccagtgcttcctcaagtaaatcatttgactatgtaaatggcagtcaagcaagtaccagcattggggttggcactgagggaggtactaatttagcagccaacaatgctaatcgatactcaactgtcagtctgcaggaagaccggctaggtcaagctggcgaaggtaaagagctcctcagcccaggagcccccttgaccaagcagtctcgatccccaagtttcaatatgcagctaatatcccaggtgtagttttgacatcctccctcatctttctgcttaccttttaaactgaacatttcattgtgcaagaagacacttcatcccacattgtgaaaatattggtcactgttatcagatttcatttagtttaggtatcttcatactgtattttgtatcaaaacagcaataaggttttctttatccctctttcctacatcttctcttcacctatcccttgtaaatgtgtttgtgaagcagtataaaatggttgccttttccatgccttcctttctccttgggtgatgtgcaatccatcgtaggctgatcggtcccatttcaacactgtgagactgagggtacattagaggaaatggtgtatatgatccctatgaaacgattctttggcttttgtttaaaaacaaaacgggtttgttctcataatctatagaactatgaagattactggatcatatttttttctcttaaccaggagtgcctcagagattctgctatgactttggacttctctgagtctgtgcaatcattttctggagaagcatggggaaaggtggtagactgctgcactttttcattaaaatgagggtagctctttctccacccccccatctcctttatcccgaagacataaatgttcaattacggaggcatttaaatcaagttgtgaccacctccattggagggcaggactcttgattgtgtaattgataatgcactttctcaatggctgtatagtcattattaacgtgtcttccctcttccccacaaggacatataaggtcatttctgtccttcaagtttggccaactaacaaatcagaatctgaggggcatgttctatttcccaggaatgattgacactttggtgctggggttttgtgggggcggggggtagtttttgtttagcttttgtggagattgtgtgtgtgagaggagatttgatttttttttcttcttttcctttgtgagctgatggctgaagtgtaacagtacatcttcaggtaaagagagggatttctcaatctactttctgttatgtcagactataagagaaaccctttcagctgctttctagatgtacctaaattcagtcagacattttggattaagaaacctaaagtcctgatacattacatactccaaggaaatatatcagggacagacaattggctgaaacactgatacttcaatgtgacacatttttatagaacatttctaccagggggtactgaccttgatttctcctacaaggaccacactgcctttgtgtttaatgtaatgcaatttgtgtaccttctaatcatatatctgcagttcctcatttttataaaactttgatatcatgccagtaagctagatgttgaatgtatgtaagtagcatttggtaactgctaagaggttacaaaaacattattggtaaaaaaaatttccttagttctgatctggttggataagattttatcataacttttctgggtctcaggctctgatgtttgaaaaagaagggaatatattgggttttaaaaaagtgtattgtgacttaaactgttataagttatccttccacagaatacatcagagctatcagtgctttgtacatttagatgtttttacttgattattgtttaagaaaaatatactgaatttatagaaagcaagtattctcctaattagcaaaagttaaaattttatctctaccattaaaattacaatagattttgataaataaccagaaaaaacgcctttttttttttcacacctagcaatcctcccgtttttattgtaaggactttcttttttccctaagagactttctgttagactctttatatatgagatgcttgtttaaatatggtggtctgtaacatttttccagctcatgtgaaaatggaaaactagaacctgaactagtatctacaacattgccaaagtccagggtaaagctaaaagttgataagtagacaatttattgttttgtgtgtgtctgtgtgtgtgtgtgtgtgtgtgtgtgtgtgtgtatggtgtgtatatgtatatatcacaaagttgtattttaaatattttaaataccctttcttttaatttaagggatgtcaaataaatgaaaggagtttaaaaatagccaaaataaatgagctataaaggcccataacatactaaaacaggcagtttcaggtatgtaaggaaaggaacattatacttacctagaaagtgagatctaaaaaaaaattaaaaataaataaaaaataaaaaagaaagtgagatcttggctatggctggaggtcagtcactttatggcataaattatttgggaggtaaaaagactgttttcaattcaaattgtgcatttattggcatctaaatctagcatgattttggttagagcacaaaagaaataccacataataccaaatcacagcaaatgttagaattaatacaacaaaattttcctttggctagaaatcttatgttatacctgaaaaattggttttaaaaaatgttcatcttggccgggcacggtggctcacgcctgtaatcccaacactctgggaggctgaggtgggtgaatcatgaggtcaggagttcgagaccagcctggccaacatggtgaaaccctgtctctactaaaaatacaaaaaattagctgggcgtggtggcaggcgcctgtaatcccagctactcgggaggctgaggcaggagaatctcttgaacctgggaggtggaggttgcagtgagccaagaatgcactactgtactccagcctaggcaacagtgcaagactccatctctgaaaaaaaaaaaaaaaaaaaaaaaaaaagttcatcttagaggattttatttatctgtatgtatatacatatatgtttgtatgtatacatacccacattaacattttatgaccctgtaacatttgttttctattcttttaggtgatgtgaattgacctcagtgaagaaacatttcatttagtctaagccttgcattcagggtcttacaacagatttcttgtgcaagaattattattagttaaaatggaaggtgttagtttaacaaactgagagtcaaattttctaagtttttaaatatgcattttaacatgcattatttttggcatttaatttaaaatagttttgtttcatgtatacaacagctgttacagatatatgccagcaatattcatacttttttaacaagcttttgttatatattttctaatctccataaaagtctaatcatctatgaaaaagatatttagggagaaaatacttgttttctgtaataaaacaattaggttggtgccatgtatgccaagttggataaaagaatacaaagaaacagctgaaggttttgggagctcgctctgacattaattactagaaagcaaactaaaatgcaaagtgaatagttaactcagaagatttgaattttttgaaatagggtctcactctgtcctctaggctagagtgcagtggcactatcacggctcactgcagcctcaacctccctgggctcaggtgatcttcccacctcagcctctggagtagctggaactccaggcatgcaccaccacacctggctaatttttgtatttttagtagagacgaggttttgccatgttgcccaggctggtctcgaactcctgggcttaagagatccacccacctggcctcccagaagtgctaggattacagacataactaccacacctggcctgaagatttttaaatgtgaaaatattttaagaagctaaggggaaaatcgttattttaaaatcctgatccccttaactttaccccttaccattccccttacctttccaattcacttttgtctatttattatagaatcagaattgtgctaagaagaaaccctggagataatctagctagtctcccactccctcaccccaaccttcatcctcaagaaacagaggctcagaggttgtggtgtgatcaagatcatatacctaaagcagagccagaatcaaacccagtctcccatgggtttggggaggcagtgggttgttaactccatttttgcagtttctttatagttctggtctagtagttggtgaatacaacacattaagaaaagtgttaaatccagaaaaaatgtagagtaatctagatggggaaatgttggaaatgttaagtatatctacagatgtaaggatcaatacattattctaatttatgccttactattttctgccacataacagttgtatgctgccattttatagttgaatacatttgttgggatttatttaaatataaaataaaccctgtgaaatggctttgatcagtgttttctagttattttaaagtaatttttgagtcagccagctttcagtcaccagtgtggcaagctaattatattgcacaatagagtattgcaaagtaaagattaaataaatttgattccattactttttaatgtagaaagagactgaatcttatgcttagagcaaatgcaagcaatatttccttatatgattgaaaaaggttctatagtgtgaagcttatgattccataatggaacagtgaccatgatgtcatttaaagtgtgtatataccatataaaatgtcttaaatgcggtagtctcagctatataagctcagtatttccagtctgtattctcagattccatctagtagctttaaattaattaaaattgtttattagacactggaatactgagaataacttctttcagattgttttgtttgcaccacttttgtgaatattttaatgaagtggagtccatttttgagtacttcagttgttgacaatcagttgtctcgtttaaatctctgcatgttcatttgtaaataaaaaatgtagtacctgtctttaggggtagtcccctatttattacaaacactggcaaggaatatctgtccatttctgaccttggattacaaagtatgttttgggtttttccttttttaatcagtatttcagttacatctttgttttcagctttaaaaagtttaacgggtcatgccaatgatcagaaaatctgtaagaattttagagcaatttttctatgtacagctatgttaaacagtctgaacatgagactttttctttcaagttgaagattattgtcatcgttttaccactaagttggttgagacacttacttgtaatactttaatttttttaaagtgtttttagaaacaagttgtttgaaaaccaattagaaattagaatatttgccagattataagcagatggaatgcagtgtaaaactgttaacaatgctaataaaattatgagtcatcagattggtacagttttccctgccaagatggtcatattgataatgtaagacaaattttagtattacttgcattatgtgtacctaataggtatatcatactggtactgagcatatatagaaaatactattcatagaggagtcatcaccacccaacctccttgcctgtgtaggcatatttcttctgaacctgaccacacaagtacaacattttggtaacttcagtcttttcagtatttttgtaatcttagccatagtcctatgagaaatgtacataagagcaaacaattcaggatagaaattagcagaaagctgggaatgatgtgaaataactggcagcatagtacagaaatgtaaggtatatgttttgcttctggatttttagaaattgtgctaatcatgtttacaaattaaggcatattcagatgtctgctattatgtttaatattgatttgataaaaaaatggaattaggtgtagcttagagtataaatgagtctttttaaaaatgtgtatctggaagtagggctaataaagaaatccttttattttcaaagaaatgaacttaattggacaactcatccccaattacagaattgatatcaatatggtttgctgtatttgagtataaacagctcagtgttaattatatcaaaggaagttctttacatcttcattgattacaaaatttaccaaagaaaatgtatctaccaaatataatttttaaagtacttgttaaggaatgaggcctctttaacatataaagtatcttaaaaatattctctgacctggaaaataggtttacagtagctacaagattccattttaggttttcttatgtcaataaatgtcaatattttacacttccagcaaaagtacccgttaaagctaaatctaaatattattcctcatagcacagtttctggtctccttaaattaaggatcctactcatcaggattgaataaaaagggggaaattcctaaaattggtatattgtataatattgtgggttaagtaaaatttaggggggcattatggaaatgtacctattttaaagggcagtggcaattactataatattggttaaactggtaaagtttgttaaataatttatgtccatgatcattctgagtgttttttttctttgcagaaaaacaggattgggttaagaaaagctaaaatactcatttttttaaaatgtatagcccaataagaactaaatgatttatttcaaaagttaaataattttttttggaaatcatggaatgtatttgcatattgatgttccaaacaggttttatgtattgttttttatagcagggagtagttgaaaagtaatgagtatattgattagctgtcttggaaagagaggattggctttctaacaatcactgatacaggtttgggtttgggggggtttgtttgtttgtttttaagttttatcatccatactgaattgagagatatgctccatgtttaaaaatatttgtaataagttcatctacttgacactgaatcttttttattcttactctaaaattattctggctttacattcagtttaagtggttaagtgaaacagtttttagggtgcaaaaattattttcccactgtttttctcatgataatttgagtctcctgagctataatttctgaaggatttttactactttggcattatgtaatctgatctctgtcacaatgatattaaataagaactatctcactttcatatgtttgcttcataaaaggatatggaatgtacacatcagctctttttttttttttaaactagcatcaacctataacttggtataaacttcccaagtatttagagaatagtgctggtgaaaatttaaataggataggcatatagaaattatgacttgtattgagtgatgtcctttcaacctaggactagtgacaaccttcattttttcagagctgaagaaaaaaccgtgaatttaagatcatatttattggtgcatgtaagccattatcctgtcttaatgaaccgattaatgctgttgattgttgaaatgtgaaatgtagtcactgttgaccttgtaaatatctgccagagatgaaaaaatattttaagttattgtaaataaagatgtataaaattcagtatcagtctgcaatgcagaaacatatcttagatgttaaaatactgtgtttgagagatgtgtaatttacccttagatgtatctagttacattaagagtgtaaatttttttgtacagtataaaaatacagctctatttggcttttaactggaaaaaaaaaaaaaaaa

SEQ ID NO: 339 - DNA, 1818 bp, Homo sapiens
gtgctcaaaaacagagtctctctgtggaaggccagttccccaatcccagagagcgtcaaatgaagagaggtaccgactcctgtcccacccaggacgcagccttcagcctccagccttctgaggcagagtaggcatttctgcacgtctgcaaaaggaagggagggaagcactccatcatctcactgggaagaacggcacgggcatacctgcagctactggggttccactgggcttgagggtcgatttttcaccttttgaaggacaagatgcattggaagatgttgctgcttctgctgttgtattacaatgctgaggcttctatgtgccacaggtggagcagggctgtgctcttccctgccgcccaccggccaaagaggtcctcatcactgccattgaacccagtcctgcagacctccctggaggaggtggagctgctctacgagttcctgctggccgaacttgagatcagccctgacctgcagatctccatcaaggacgaggagctggcctccttgcggaaggcctcagacttccgcaccgtctgcaacaacgtcatccccaagagcatcccagacatccgccggctcagcgccagcctctccagccaccctggcatcctcaagaaagaagactttgaaaggacagtgctgaccctggcctacacagcctaccgcacagccctgtcccacggccatcagaaggacatctgggcgcagtccctcgttagcctcttccaggccctgaggcacgacttgatgcgctcctcacagccgggagtacctccctgagagactggcccacaccaggacctcagagcagggaccagcacagtaatccagaaagtcttcattctctactccatttacagagaccagcaacaaaactcttaccgctgacacagagcagcagagatcaaacagtaaccccgatgctcttttctccttgtagtttcctggaagacacatctgattcatgccatcatgtgacctgggctggaagaaagggctggaatggtcattcaagacgcctccatgggcagaatggtttgcctatggcaggcagaattctgatatgcttcaacccagagcagtggccacacactcaagagtgagaacaggcgtgagccaccgtgcctggcccaggatctaaaaactttctaagtttcctccatcgttggcatcctcacagctatctccaatgtcactcaagagacatcaacagacatttaactgctgcagacttcattgctctgtcacctcaccttgaatctaacaaatcaaagtatttctgcaggtccaatggtctaaaatcaaatgcttgttaaatgactttttacaacaccccttactttcctaatccatttcaatcttattttttttattgtggtaaaaaacacatcaggtaaaatgtaccatcttaaccatttttaagcatatggtacagcagtgttaactccatgcatgttgtgaaacagacccccggaactttctcatcttgtaattctgaagttctatacccaccgaacaactcctcttttccccttccccctgcctgccccagctcttggcaccattattctgctttctgtttttgagagtctgactacttaagatacctcatacaagcgggatctggcttacatttcttgagcattgtattctggaaaagtgtttccttcctctgaaaaatgggtagagttctgaaggagaactactggtcttattgtacacttgctgtacctatttttatttaacaaatattcatctatggtataataaagatgtcatgattgagttgctcaaaaaaaaaaaaaaaaaa

SEQ ID NO: 340 - DNA, 5720 bp, Homo sapiens
gcggctcaggggcggggacgggggcgtggtcccgccgtataagaacggagggggcggcggcgggacggctcactcggtgccgctgcctaggggctgtagaggtcgcgccgctcctgctggggcctgcccacgccaaggacctgcctctgtcgcctcctcttctattgcccagtttccccagccagaacatcccctgaagatggcagaggagagcagctgtaccagggattgcatgtccttcagcgtgctcaactgggatcaggttagccggctgcatgaggtcctcactgaagttgtacctatccacggacgaggcaactttccaaccttggagataactctgaaggacatcgtccagaccgtccgcagtcggctggaggaggcaggcatcaaagtgcacgacgtccggctgaatggctccgcagctggccacgttttggtcaaagacaatggcttgggctgcaaagacctggacctaatcttccatgtggctcttccaacagaggcagaatttcagctggttagagatgtggttctgtgttcccttctgaacttcctgccagagggtgtgaacaagctcaaaatcagtccagtcactctgaaggaggcatatgtgcagaagctagtgaaggtttgcacggacactgaccgctggagcctgatctccctctccaacaagaacgggaagaacgtggagctgaagtttgtcgactccattcggcgtcagtttgagttcagtgtggactctttccaaatcatcctggattctttgcttttcttctatgactgttccaataatcccatctctgagcacttccaccccaccgtgattggggagagcatgtacggggactttgaggaagcttttgaccatctgcagaacagactgatcgccaccaagaacccagaagaaatcagaggcgggggacttctcaagtacagcaaccttcttgtgcgggacttcaggcccacagaccaggaagaaatcaaaactctagagcgctacatgtgctccaggttcttcatcgacttcccggacatccttgaacagcagaggaagttggagacttaccttcaaaaccacttcgctgaagaagagagaagcaagtacgactacctcatgatccttcgcagggtggtgaacgagagcaccgtgtgtctcatggggcatgaacgcaggcagactctgaacctcatctccctcctggccttgcgtgtgctggcggaacaaaacatcatccccagtgccaccaacgtcacctgttactaccagccggccccttacgtcagtgatggcaacttcagcaactactacgttgcccatcctccagtcacctacagccagccttaccctacctggctgccctgtaactaaccttgagacctgagggtttccacagtgggaaccccaatagggctagggctctcaggtaggggagcctccttctagatgtaggcatttggcttttaaaggggaactcagctctgattctgcttttttttttttttttcctttgtgtacccattggaatgggtctacagtgtatcatgagccaaccctcaaaggacccgtattacagtgccacgttggaaaacgctacaggaagcatgacctatccacatctttccaagatagacactaacatgtcatgtcccaaacattagcacgtgggggttgagctctgtgcagtaatcgagattgggagaatttgggcagcgcgtgagaagtgctaagctacttgttttctcacttgagcccgggtaggctgtgttggccctcacttgggattctcagcagttacatgaaagttgtgctgataatctcttctcttgtaccaattttagtcaggcagaaaatggtaaacatgagggtgctcttgtgacttaatttttgttcaagggactaaattgcttatgtttattccctgtcagcggagtggagaatgtcattcatcaataaaccaaagccaatagctggagaattgagatctggttgaaagtggtttatggtttacatgctgtactatcctgaggaattgcgagatattgctgaggggaaaaaaaaatgaccttttcttgaaatgtaacttgaaaacaaaataaaatgtggaacataatgtttaattagaattgtggtggtggtagtggaaggggataattgtaaataggaaacatgaatgttcatttttttctttaaagaattcttattaaatggctccctgccttttttttcttttttcctcatcagctctttcatggctgaattttgttttattcttcctaagactgaggattgtgctgagtccagagtcattgtggtaactgacatgagggtcttcccatgttttaactggaaacccactttggtcacattccaagtatgacacagctgttcttctggagtactttagctattttttgtttttgttcttttcgttttttttttttccaaaaatagtgacttccttctccaggtgtgtttgacagcaactcaattcaggaatttcggtagaactgagtgacctgtggaactgctttagaatctaacctgctgtcttcgtgctctgtgtgaaggggaagctggggggttagcatgaagtctggccttgtgtgcattggagcttccaaggcactttgaaatcattccagtatatttgggaagaattgagtgaatgagaatgctcttccttattctggtagatttgacttgtttataattctgcactttagaagaaaaacagtgttaatctgtagttgaaagaaagcttagtagatgagagagttctaggctactgtggctttttccagtagatttagatgagattatgtgttttgaaatgttttgtgggatcccttagaaagcatcacttcagggcagagacactcaatattgccagccagcttgggttctaaagtgatttaatcaaattcatgctcctgatcttttttttcccccttcctttggctatgaaaacccaaagcccggagtgattgttttctccttgctttaagcagtgaagttatcctaatgcaaaagagcttagtagaaaatgagtggtttacctttttttctaaaagtatattttcaagtttattctggaatgtgatgtcttggtcctcttaaaagcagatcagccatgactgaaactcaaggcttagctggtatctatgttgtgctacattaggtgactagaagccacttcttagtgtaatcagctcctgtttccctgtgagccttagttatattttaattcagtggctttgagtcaaggccggttctaattgaggggacccagtgtgcttcagtgttaagagtggggcaatgaagagtgaaccccaatgaagagtgatcccaactttggaaactatctggtcattcatgaccttaaaaagctgccatggtggtcaaatggcatgtgtttgcacaaaaatgaccgatgtgtttaaccaaagctttgaaatgtgatgaagccaccaacataagcacttgcctaacagaaatcagtatttcttctacttagaaggcttggggcccagggtaatgaggcaccagatgaagataagatctgcatcaaggaattaaatttccagtttgtccttggggttctttctgcttatgttttttcccccccatctggtaatagtcctcttctgagaatgaaaggaggcacagaagttgcgagaaagacccagtccccagtctttgccaccattgcaccatggttgtctcggagtcccttcacctgacctttttagtcagctcagatctttttgtagtttgagaatagacctattcaagagctatcagggttaaaagctgcactgaccaaagctgtacttttaaaacacaacccctgggctagtgatgtctctacttgctctatgagccttttgccagcctcagaataggcgaggtaaccttgaatttcagggccctggaaactctagctgaaacctgcctttcctaatgctcacacaagcaccaggtaccctgagcttatactgagtccagtggttcctattttatgtgtgtgtgtatgtgtgtgtgttgagtaacatgaaacttggcagtagcagagagcactgaagttcacatgcaagttctaatctaaagttaagcagtctcttatttgtttcgggactctgatttgactctttttctgatgctttcggcatgtctgcagcctgttctcctagcctgctgcttggagtcaggttgagcatcagtgagatgaagacagtaccttttcctctcacattggcagaatagcacgcactagatgcctgaccttgagctctagtctcccctttaaatcttaccttggcagtaacacattattcctcattcaataatttcaatgctgaaactgaactctattactaatgccttccaatcagagttcctgatggggatgcctgtgggatggcccacacctgggggacctggcagatggggtgagttgggtaaggaagatgatgcttagttcctgatagatgctacagatgtagtttggcatttcagtttttgtccagtttgattttcactggggtttgagtcacagcaagctgtgtatgaacttgtgttttgtggtgacacattaataatcaaattgctaaaaccctgaatctgcttattcttcagcttcacctctgcactaaccccttacccttatggtacgtcaggattttaactagtactgctttgttgactttgggaaatggtgccactcaaaagcaacttcctaacttgaggaataactcctttgtagtttactttctggtactggttggtgccttgtattgggatacagctatattcttagctcaaatgtcctctttttgagagcaaagtagttatccaatggtgagacgagaccctgacgctcatagaggccattccttcctgggtgtcggaccagggctctgtgtcagggaaaaccttctgggtggactttgtaagaatccagtttccaaggttagattcacatccttaatcttgcagagactagaatttcacagctcgctttggaacatattccaattcaaccagttaaaatcagaggaccaagtcgtgggggaggggggcggtgttgaggagaggtatttttaaagatctggcaacttttcaggattatttgtggagaactctaaggttaagatcaggaaataaaagactgtgtgtgtgtgtgtgtgtgcgtgtgtgtgttcaagtgcctaaatcttgtttacctatcactttaaaaaaataattgaagtgtaagctaaataaaatgcttggagttttgcctgggctagtgagagttggtgcaaattcttgtgtgtgtttgcataggaaggtgagatgaccatctactaaagaggaagtagctaaatacagatctgtgggtgtttttaaaaaaactcaacctatctggtgttttattttaatggataaaaatgtaatttttctaaggtagcaacttatttccaaattaatatagatgaaaaatagataccaattagactaaattgaaagctttttgttctatatttgcatagcctttgaaatatttcttagtgcctaggaggtctggggattcctctttcgtggtggtcactaaccttacttgatgcagataaaatcacttgtcaatgcaaaatgtgttagaacttgataaagctttgagtttgagaaataaaggtatatttaaaatttaaataaaacttgtcatttatgctca

SEQ ID NO: 341 - DNA, 2810 bp, Homo sapiens
ctcctccccggctccgccccgcctccccgggcccgccgctcctcgcggcctccgcgtcttccttccgggtcgcgctaggccgggcttgcggcggttgtgccgcatctagagagtcggggagccgcccccgcacccaggccttctcgcgctgcctggtcgctggtgaagcccgcggcgcgcgcctctcccggaccctgcagggtaaaagaatgtcacatgtcagcatttgtacctgaagtcagcatgcaaagttcagggtacctggatgaatgccaacttttgcatttcccatgtgtatcctgtgaccattctatctgggaacatccttcaaagagttcatgcatcttactgaggacacctgaccttttgaagcttcataattcacatctagatgtcaccggtctttcccatgttaacagttctgaccatgttttattatatatgccttcggcgccgagccaggacagctacaagaggagaaatgatgaacacccatagagctatagaatcaaacagccagacttcccctctcaatgcagaggtagtccagtatgccaaagaagtagtggatttcagttcccattatggaagtgagaatagtatgtcctatactatgtggaatttggctggtgtaccaaatgtattcccaagttctggtgactttactcagacagctgtgtttcgaacttatgggacatggtgggatcagtgtcctagtgcttccttgccattcaagaggacgccacctaattttcagagccaggactatgtggaacttacttttgaacaacaggtgtatcctacagctgtacatgttctagaaacctatcatcccggagcagtcattagaattctcgcttgttctgcaaatccttattccccaaatccaccagctgaagtaagatgggagattctttggtcagagagacctacgaaggtgaatgcttcccaagctcgccagtttaaaccttgtattaagcagataaatttccccacaaatcttatacgactggaagtaaatagttctcttctggaatattacactgaattagatgcagttgtgctacatggtgtgaaggacaagccagtgctttctctcaagacttcacttattgacatgaatgatatagaagatgatgcctatgcagaaaaggatggttgtggaatggacagtcttaacaaaaagtttagcagtgctgtcctcggggaagggccaaataatgggtattttgataaactaccttatgagcttattcagctgattctgaatcatcttacactaccagacctgtgtagattagcacagacttgcaaactactgagccagcattgctgtgatcctctgcaatacatccacctcaatctgcaaccatactgggcaaaactagatgacacttctctggaatttctacagtctcgctgcactcttgtccagtggcttaatttatcttggactggcaatagaggcttcatctctgttgcaggatttagcaggtttctgaaggtttgtggatccgaattagtacgccttgaattgtcttgcagccactttcttaatgaaacttgcttagaagttatttctgagatgtgtccaaatctacaggccttaaatctctcctcctgtgataagctaccacctcaagctttcaaccacattgccaagttatgcagccttaaacgacttgttctctatcgaacaaaagtagagcaaacagcactgctcagcattttgaacttctgttcagagcttcagcacctcagtttaggcagttgtgtcatgattgaagactatgatgtgatagctagcatgataggagccaagtgtaaaaaactccggaccctggatctgtggagatgtaagaatattactgagaatggaatagcagaactggcttctgggtgtccactactggaggagcttgaccttggctggtgcccaactctgcagagcagcaccgggtgcttcaccagactggcacaccagctcccaaacttgcaaaaactctttcttacagctaatagatctgtgtgtgacacagacattgatgaattggcatgtaattgtaccaggttacagcagctggacatattaggaacaagaatggtaagtccggcatccttaagaaaactcctggaatcttgtaaagatctttctttacttgatgtgtccttctgttcgcagattgataacagagctgtgctagaactgaatgcaagctttccaaaagtgttcataaaaaagagctttactcagtgacttaatatatgttctgtattaaaattaatgtgctttgttggggtttaattttgggattggttttgggttttgtttttagttgttttaatggtaagaattaagacatttgtagattttaaagaaaaatatgaaattgtccattaaatcaagtaaaaatgtgcacaaatgttttcataaaatactgcaagcacttctcttcaagaatatgagtggatattatttttaccttatgttaatcagtgatatgctttagtcaataatatgattgataaaagaataacatggaatcatgctaacttattttcaaaggaacactgagcaataaagtatcgtggcatttatgcaaaaaaaaaagttaattttttacaccttcatgtaaggatgtcttattaagcctgtgacctggcaagtgttttgtttggtatgtacaaaatggtcagagctagttggagaatgagacatgcttttccagctgtttggttatttctctggattaactgttcaactggaaaatttttagtttttctagccaggtgtggtggcacacacttgt

SEQ ID NO: 342 - DNA, 6774 bp, Homo sapiens
cggccccagaaaacccgagcgagtagggggcggcgcgcaggagggaggagaactgggggcgcgggaggctggtgggtgtggggggtggagatgtagaagatgtgacgccgcggcccggcgggtgccagattagcggacgcggtgcccgcggttgcaacgggatcccgggcgctgcagcttgggaggcggctctccccaggcggcgtccgcggagacacccatccgtgaaccccaggtcccgggccgccggctcgccgcgcaccaggggccggcggacagaagagcggccgagcggctcgaggctgggggaccgcgggcgcggccgcgcgctgccgggcgggaggctggggggccggggccggggccgtgccccggagcgggtcggaggccggggccggggccgggggacggcggctccccgcgcggctccagcggctcggggatcccggccgggccccgcagggaccatggcagccgggagcatcaccacgctgcccgccttgcccgaggatggcggcagcggcgccttcccgcccggccacttcaaggaccccaagcggctgtactgcaaaaacgggggcttcttcctgcgcatccaccccgacggccgagttgacggggtccgggagaagagcgaccctcacatcaagctacaacttcaagcagaagagagaggagttgtgtctatcaaaggagtgtgtgctaaccgttacctggctatgaaggaagatggaagattactggcttctaaatgtgttacggatgagtgtttcttttttgaacgattggaatctaataactacaatacttaccggtcaaggaaatacaccagttggtatgtggcactgaaacgaactgggcagtataaacttggatccaaaacaggacctgggcagaaagctatactttttcttccaatgtctgctaagagctgattttaatggccacatctaatctcatttcacatgaaagaagaagtatattttagaaatttgttaatgagagtaaaagaaaataaatgtgtatagctcagtttggataattggtcaaacaattttttatccagtagtaaaatatgtaaccattgtcccagtaaagaaaaataacaaaagttgtaaaatgtatattctcccttttatattgcatctgctgttacccagtgaagcttacctagagcaatgatctttttcacgcatttgctttattcgaaaagaggcttttaaaatgtgcatgtttagaaacaaaatttcttcatggaaatcatatacattagaaaatcacagtcagatgtttaatcaatccaaaatgtccactatttcttatgtcattcgttagtctacatgtttctaaacatataaatgtgaatttaatcaattcctttcatagttttataattctctggcagttccttatgatagagtttataaaacagtcctgtgtaaactgctggaagttcttccacagtcaggtcaattttgtcaaacccttctctgtacccatacagcagcagcctagcaactctgctggtgatgggagttgtattttcagtcttcgccaggtcattgagatccatccactcacatcttaagcattcttcctggcaaaaatttatggtgaatgaatatggctttaggcggcagatgatatacatatctgacttcccaaaagctccaggatttgtgtgctgttgccgaatactcaggacggacctgaattctgattttataccagtctcttcaaaaacttctcgaaccgctgtgtctcctacgtaaaaaaagagatgtacaaatcaataataattacacttttagaaactgtatcatcaaagattttcagttaaagtagcattatgtaaaggctcaaaacattaccctaacaaagtaaagttttcaatacaaattctttgccttgtggatatcaagaaatcccaaaatattttcttaccactgtaaattcaagaagcttttgaaatgctgaatatttctttggctgctacttggaggcttatctacctgtacatttttggggtcagctctttttaacttcttgctgctctttttcccaaaaggtaaaaatatagattgaaaagttaaaacattttgcatggctgcagttcctttgtttcttgagataagattccaaagaacttagattcatttcttcaacaccgaaatgctggaggtgtttgatcagttttcaagaaacttggaatataaataattttataattcaacaaaggttttcacattttataaggttgatttttcaattaaatgcaaatttgtgtggcaggatttttattgccattaacatatttttgtggctgctttttctacacatccagatggtccctctaactgggctttctctaattttgtgatgttctgtcattgtctcccaaagtatttaggagaagccctttaaaaagctgccttcctctaccactttgctggaaagcttcacaattgtcacagacaaagatttttgttccaatactcgttttgcctctatttttcttgtttgtcaaatagtaaatgatatttgcccttgcagtaattctactggtgaaaaacatgcaaagaagaggaagtcacagaaacatgtctcaattcccatgtgctgtgactgtagactgtcttaccatagactgtcttacccatcccctggatatgctcttgttttttccctctaatagctatggaaagatgcatagaaagagtataatgttttaaaacataaggcattcgtctgccatttttcaattacatgctgacttcccttacaattgagatttgcccataggttaaacatggttagaaacaactgaaagcataaaagaaaaatctaggccgggtgcagtggctcatgcctatattccctgcactttgggaggccaaagcaggaggatcgcttgagcccaggagttcaagaccaacctggtgaaaccccgtctctacaaaaaaacacaaaaaatagccaggcatggtggcgtgtacatgtggtctcagatacttgggaggctgaggtgggagggttgatcacttgaggctgagaggtcaaggttgcagtgagccataatcgtgccactgcagtccagcctaggcaacagagtgagactttgtctcaaaaaaagagaaattttccttaataagaaaagtaatttttactctgatgtgcaatacatttgttattaaatttattatttaagatggtagcactagtcttaaattgtataaaatatcccctaacatgtttaaatgtccatttttattcattatgctttgaaaaataattatggggaaatacatgtttgttattaaatttattattaaagatagtagcactagtcttaaatttgatataacatctcctaacttgtttaaatgtccatttttattctttatgtttgaaaataaattatggggatcctatttagctcttagtaccactaatcaaaagttcggcatgtagctcatgatctatgctgtttctatgtcgtggaagcaccggatgggggtagtgagcaaatctgccctgctcagcagtcaccatagcagctgactgaaaatcagcactgcctgagtagttttgatcagtttaacttgaatcactaactgactgaaaattgaatgggcaaataagtgcttttgtctccagagtatgcgggagacccttccacctcaagatggatatttcttccccaaggatttcaagatgaattgaaatttttaatcaagatagtgtgctttattctgttgtattttttattattttaatatactgtaagccaaactgaaataacatttgctgttttataggtttgaagaacataggaaaaactaagaggttttgtttttatttttgctgatgaagagatatgtttaaatatgttgtattgttttgtttagttacaggacaataatgaaatggagtttatatttgttatttctattttgttatatttaataatagaattagattgaaataaaatataatgggaaataatctgcagaatgtgggttttcctggtgtttccctctgactctagtgcactgatgatctctgataaggctcagctgctttatagttctctggctaatgcagcagatactcttcctgccagtggtaatacgattttttaagaaggcagtttgtcaattttaatcttgtggatacctttatactcttagggtattattttatacaaaagccttgaggattgcattctattttctatatgaccctcttgatatttaaaaaacactatggataacaattcttcatttacctagtattatgaaagaatgaaggagttcaaacaaatgtgtttcccagttaactagggtttactgtttgagccaatataaatgtttaactgtttgtgatggcagtattcctaaagtacattgcatgttttcctaaatacagagtttaaataatttcagtaattcttagatgattcagcttcatcattaagaatatcttttgttttatgttgagttagaaatgccttcatatagacatagtctttcagacctctactgtcagttttcatttctagctgctttcagggttttatgaattttcaggcaaagctttaatttatactaagcttaggaagtatggctaatgccaacggcagtttttttcttcttaattccacatgactgaggcatatatgatctctgggtaggtgagttgttgtgacaaccacaagcactttttttttttttaaagaaaaaaaggtagtgaatttttaatcatctggactttaagaaggattctggagtatacttaggcctgaaattatatatatttggcttggaaatgtgtttttcttcaattacatctacaagtaagtacagctgaaattcagaggacccataagagttcacatgaaaaaaatcaatttatttgaaaaggcaagatgcaggagagaggaagccttgcaaacctgcagactgctttttgcccaatatagattgggtaaggctgcaaaacataagcttaattagctcacatgctctgctctcacgtggcaccagtggatagtgtgagagaattaggctgtagaacaaatggccttctctttcagcattcacaccactacaaaatcatcttttatatcaacagaagaataagcataaactaagcaaaaggtcaataagtacctgaaaccaagattggctagagatatatcttaatgcaatccattttctgatggattgttacgagttggctatataatgtatgtatggtattttgatttgtgtaaaagttttaaaaatcaagctttaagtacatggacatttttaaataaaatatttaaagacaatttagaaaattgccttaatatcattgttggctaaatagaataggggacatgcatattaaggaaaaggtcatggagaaataatattggtatcaaacaaatacattgatttgtcatgatacacattgaatttgatccaatagtttaaggaataggtaggaaaatttggtttctatttttcgatttcctgtaaatcagtgacataaataattcttagcttattttatatttccttgtcttaaatactgagctcagtaagttgtgttaggggattatttctcagttgagactttcttatatgacattttactatgttttgacttcctgactattaaaaataaatagtagatacaattttcataaagtgaagaattatataatcactgctttataactgactttattatatttatttcaaagttcatttaaaggctactattcatcctctgtgatggaatggtcaggaatttgttttctcatagtttaattccaacaacaatattagtcgtatccaaaataacctttaatgctaaactttactgatgtatatccaaagcttctcattttcagacagattaatccagaagcagtcataaacagaagaataggtggtatgttcctaatgatattatttctactaatggaataaactgtaatattagaaattatgctgctaattatatcagctctgaggtaatttctgaaatgttcagactcagtcggaacaaattggaaaatttaaatttttattcttagctataaagcaagaaagtaaacacattaatttcctcaacatttttaagccaattaaaaatataaaagatacacaccaatatcttcttcaggctctgacaggcctcctggaaacttccacatatttttcaactgcagtataaagtcagaaaataaagttaacataactttcactaacacacacatatgtagatttcacaaaatccacctataattggtcaaagtggttgagaatatattttttagtaattgcatgcaaaatttttctagcttccatcctttctccctcgtttcttctttttttgggggagctggtaactgatgaaatcttttcccaccttttctcttcaggaaatataagtggttttgtttggttaacgtgatacattctgtatgaatgaaacattggagggaaacatctactgaatttctgtaatttaaaatattttgctgctagttaactatgaacagatagaagaatcttacagatgctgctataaataagtagaaaatataaatttcatcactaaaatatgctattttaaaatctatttcctatattgtatttctaatcagatgtattactcttattatttctattgtatgtgttaatgattttatgtaaaaatgtaattgcttttcatgagtagtatgaataaaattgattagtttgtgttttcttgtctccc

SEQ ID NO: 343 - DNA, 3936 bp, Homo sapiens
agttttaattgcttccaatgaggtcagcaaaggtatttatcgaaaagccctgaataaaaggctcacacacacacacaagcacacacgcgctcacacacagagagaaaatccttctgcctgttgatttatggaaacaattatgattctgctggagaacttttcagctgagaaatagtttgtagctacagtagaaaggctcaagttgcaccaggcagacaacagacatggaattcttatatatccagctgttagcaacaaaacaaaagtcaaatagcaaacagcgtcacagcaactgaacttactacgaactgtttttatgaggatttatcaacagagttatttaaggaggaatcctgtgttgttatcaggaactaaaaggataaggctaacaatttggaaagagcaactactctttcttaaatcaatctacaattcacagataggaagaggtcaatgacctaggagtaacaatcaactcaagattcattttcattatgttattcatgaacacccggagcactacactataatgcacaaatggatactgacatggatcctgccaactttgctctacagatcatgctttcacattatctgtctagtgggtactatatctttagcttgcaatgacatgactccagagcaaatggctacaaatgtgaactgttccagccctgagcgacacacaagaagttatgattacatggaaggaggggatataagagtgagaagactcttctgtcgaacacagtggtacctgaggatcgataaaagaggcaaagtaaaagggacccaagagatgaagaataattacaatatcatggaaatcaggacagtggcagttggaattgtggcaatcaaaggggtggaaagtgaattctatcttgcaatgaacaaggaaggaaaactctatgcaaagaaagaatgcaatgaagattgtaacttcaaagaactaattctggaaaaccattacaacacatatgcatcagctaaatggacacacaacggaggggaaatgtttgttgccttaaatcaaaaggggattcctgtaagaggaaaaaaaacgaagaaagaacaaaaaacagcccactttcttcctatggcaataacttaattgcatatggtatataaagaaccagttccagcagggagatttctttaagtggactgttttctttcttctcaaaattttctttccttttattttttagtaatcaagaaaggctggaaaactactgaaaaactgatcaagctggacttgtgcatttatgtttgttttaagacactgcattaaagaaagatttgaaaagtatacacaaaaatcagatttagtaactaaaggttgtaaaaaattgtaaaactggttgtacaatcatgatgttagtaacagtaatttttttcttaaattaatttacccttaagagtatgttagatttgattatctgataatgattatttaaatattcctatctgcttataaaatggctgctataataataataatacagatgttgttatataaggtatatcagacctacaggcttctggcaggatttgtcagataatcaagccacactaactatggaaaatgagcagcattttaaatgctttctagtgaaaaattataatctacttaaactctaatcagaaaaaaaattctcaaaaaaactattatgaaagtcaataaaatagataatttaacaaaagtacaggattagaacatgcttatacctataaataagaacaaaatttctaatgctgctcaagtggaaagggtattgctaaaaggatgtttccaaaaatcttgtatataagatagcaacagtgattgatgataatactgtacttcatcttacttgccacaaaataacattttataaatcctcaaagtaaaattgagaaatctttaagtttttttcaagtaacataatctatctttgtataattcatatttgggaatatggcttttaataatgttcttcccacaaataatcatgcttttttcctatggttacagcattaaactctattttaagttgtttttgaactttattgttttgttatttaagtttatgttatttataaaaaaaaaaccttaataagctgtatctgtttcatatgcttttaattttaaaggaataacaaaactgtctggctcaacggcaagtttccctcccttttctgactgacactaagtctagcacacagcacttgggccagcaaatcctggaaggcagacaaaaataagagcctgaagcaatgcttacaatagatgtctcacacagaacaatacaaatatgtaaaaaatctttcaccacatattcttgccaattaattggatcatataagtaaaatcattacaaatataagtatttacaggattttaaagttagaatatatttgaatgcatgggtagaaaatatcatattttaaaactatgtatatttaaatttagtaattttctaatctctagaaatctctgctgttcaaaaggtggcagcactgaaagttgttttcctgttagatggcaagagcacaatgcccaaaatagaagatgcagttaagaataaggggccctgaatgtcatgaaggcttgaggtcagcctacagataacaggattattacaaggatgaatttccacttcaaaagtctttcattggcagatcttggtagcactttatatgttcaccaatgggaggtcaatatttatctaatttaaaaggtatgctaaccactgtggttttaatttcaaaatatttgtcattcaagtccctttacataaatagtatttggtaatacatttatagatgagagttatatgaaaaggctaggtcaacaaaaacaatagattcatttaattttcctgtggttgacctatacgaccaggatgtagaaaactagaaagaactgcccttcctcagatatactcttgggagagagcatgaatggtattctgaactatcacctgattcaaggactttgctagctaggttttgaggtcaggcttcagtaactgtagtcttgtgagcatattgagggcagaggaggacttagtttttcatatgtgtttccttagtgcctagcagactatctgttcataatcagttttcagtgtgaattcactgaatgtttatagacaaaagaaaatacacactaaaactaatcttcattttaaaagggtaaaacatgactatacagaaatttaaatagaaatagtgtatatacatataaaatacaagctatgttaggaccaaatgctctttgtctatggagttatacttccatcaaattacatagcaatgctgaattaggcaaaaccaacatttagtggtaaatccattcctggtagtataagtcacctaaaaaagacttctagaaatatgtactttaattatttgtttttctcctatttttaaatttattatgcaaattttagaaaataaaatttgctctagttacacacctttagaattctagaatattaaaactgtaaggggcctccatccctcttactcatttgtagtctaggaaattgagattttgatacacctaaggtcacgcagctgggtagatatacagctgtcacaagagtctagatcagttagcacatgctttctactcttcgattattagtattattagctaatggtctttggcatgtttttgttttttatttctgttgagatatagcctttacatttgtacacaaatgtgactatgtcttggcaatgcacttcatacacaatgactaatctatactgtgatgatttgactcaaaaggagaaaagaaattatgtagttttcaattctgattcctattcaccttttgtttatgaatggaaagctttgtgcaaaatatacatataagcagagtaagccttttaaaaatgttctttgaaagataaaattaaatacatgagtttctaacaattaga

SEQ ID NO: 344 - DNA, 1907 bp, Homo sapiens
agggtacgggccgggaccgccgcagcccggggcgggggcacggcaaccgcgaggcctgggggcgcccgccccccgcgccccacgcccggtgccagcgagccgaggcgtgcatctccttatatggtcaaatgacacggcggggtttctcgagggcgggagctgcgcagcgctccactcggccggcagcggagccgcagccaccagccgcccgcgccctccagccccgtccgggagtccccggcccgctgcggtgccgtgagtacctccaaccccctgcgccccggagggaggccgaggggcttagccaccagggctcggaagtgggggccgaatccggtgcgagacccaaggagaggggagcagagccggagttggggagactgtggctgagaactgtgtcttcctggagactaggctggcattttgactttgggacggagtctcgctttgtcgcccaggctggagtgcagtggcacgatctcagctcactgcaagctctacctcttggttcacgccattctcctgccccagcctcccaagtagctgggactacaggttgctgaaaagccaggagtcaaaatgactgagcgctttgactgccaccattgcaacgaatctctctttggcaagaagtacatcctgcgggaggagagcccctactgcgtggtgtgctttgagaccctgttcgccaacacctgcgaggagtgtgggaagcccatcggctgtgactgcaaggacttgtcttacaaggaccggcactggcatgaagcctgtttccactgctcgcagtgcagaaactcactggtggacaagccctttgctgccaaggaggaccagctgctctgtacagactgctattccaacgagtactcatccaagtgccaggaatgcaagaagaccatcatgccaggtacccgcaagatggagtacaagggcagcagctggcatgagacctgcttcatctgccaccgctgccagcagccaattggaaccaagagtttcatccccaaagacaatcagaatttctgtgtgccctgctatgagaaacaacatgccatgcagtgcgttcagtgcaaaaagcccatcaccacgggaggggtcacttaccgggagcagccctggcacaaggagtgcttcgtgtgcaccgcctgcaggaagcagctgtctgggcagcgcttcacagctcgcgatgactttgcctactgcctgaactgcttctgtgacttgtatgccaagaagtgtgctgggtgcaccaaccccatcagcggacttggtggcacaaaatacatctcctttgaggaacggcagtggcataacgactgctttaactgtaagaagtgctccctctcactggtggggcgtggcttcctcacagagagggacgacatcctgtgccccgactgtgggaaagacatctgaattcaacacagagaagttgctgcttgtgatctcacacacagatttttatgttttctttctcacccaggcaatcttgccttctggtttcttccagccacattgagactttcttctagtgcttttcagtgatactcacgtttgcttaaaccctttagtgctttgtgatagttcagtcccagggaaagagaaaactcgccctaggccctaggtgggaagatggtttgaaatttttgtaatcgagtaaggcacacccaaatgtaaaaatccttttgaatgatgcctttataaatctttctctcactgtctatttaagtgcaattaacatatgtcacgaacttgaaagttttctaaactcaataaggtaatgaccagttgttatttacagctctgtaacctcccgttgcgtcaagtctaaaccaagattatgtgacttgcaataaagttattcagaacagaaaaaaaaaaaaaaaaaaaaaaaaaaaaaaaaa

SEQ ID NO: 345 - DNA, 7185 bp, Homo sapiens
agttgtacgttcgaaacctgtcgccgtcacttgcgcgtttggcattatccattgtcaccgcggaggaacgagcgctcgagatatcatcagtgcccgcaaatctccgcgccaaggcgctgagctactcctttccgaggtgcgcctctggtcctccgtccctggtgcccagcagcggcgaggcggcatctccgctcccgccgccgtgtccaccgagccctgggatcagggtggcagttctcaacgatgggcaggagggacctcggcggcgacccctaaaacaataccatgccccgggatccccgctgctgccgcgccagcgtcttccctttccacctccctgaccctgtcggattcggatgagcccattgcaaggagaagacgcagccgtcagattgcagattgagcttaaccaagaagttcgtaggctaatcaaggctggcttgacctacaaaagaagaagagagttctgcctgcccacttgggcttgtgttgacacggctgataacttgccatcacctgttgccagtgtggaaaaattctccctgttgaattttttgcacatggaggacagcagcaaagagggcaacacaggctgataagaccagagacagcagggagattattttaccatacgccctcaggacgttccctctagctggagttctggacttcaacagaaccccatccagtcattttgattttgctgtttattttttttttctttttctttttcccaccacattgtattttatttccgtacttcagaaatgggcctacagaccacaaagtggcccagccatggggcttttttcctgaagtcttggcttatcatttccctggggctctactcacaggtgtccaaactcctggcctgccctagtgtgtgccgctgcgacaggaactttgtctactgtaatgagcgaagcttgacctcagtgcctcttgggatcccggagggcgtaaccgtactctacctccacaacaaccaaattaataatgctggatttcctgcagaactgcacaatgtacagtcggtgcacacggtctacctgtatggcaaccaactggacgaattccccatgaaccttcccaagaatgtcagagttctccatttgcaggaaaacaatattcagaccatttcacgggctgctcttgcccagctcttgaagcttgaagagctgcacctggatgacaactccatatccacagtgggggtggaagacggggccttccgggaggctattagcctcaaattgttgtttttgtctaagaatcacctgagcagtgtgcctgttgggcttcctgtggacttgcaagagctgagagtggatgaaaatcgaattgctgtcatatccgacatggccttccagaatctcacgagcttggagcgtcttattgtggacgggaacctcctgaccaacaagggtatcgccgagggcaccttcagccatctcaccaagctcaaggaattttcaattgtacgtaattcgctgtcccaccctcctcccgatctcccaggtacgcatctgatcaggctctatttgcaggacaaccagataaaccacattcctttgacagccttctcaaatctgcgtaagctggaacggctggatatatccaacaaccaactgcggatgctgactcaaggggtttttgataatctctccaacctgaagcagctcactgctcggaataacccttggttttgtgactgcagtattaaatgggtcacagaatggctcaaatatatcccttcatctctcaacgtgcggggtttcatgtgccaaggtcctgaacaagtccgggggatggccgtcagggaattaaatatgaatcttttgtcctgtcccaccacgacccccggcctgcctctcttcaccccagccccaagtacagcttctccgaccactcagcctcccaccctctctattccaaaccctagcagaagctacacgcctccaactcctaccacatcgaaacttcccacgattcctgactgggatggcagagaaagagtgaccccacctatttctgaacggatccagctctctatccattttgtgaatgatacttccattcaagtcagctggctctctctcttcaccgtgatggcatacaaactcacatgggtgaaaatgggccacagtttagtagggggcatcgttcaggagcgcatagtcagcggtgagaagcaacacctgagcctggttaacttagagccccgatccacctatcggatttgtttagtgccactggatgcttttaactaccgcgcggtagaagacaccatttgttcagaggccaccacccatgcctcctatctgaacaacggcagcaacacagcgtccagccatgagcagacgacgtcccacagcatgggctccccctttctgctggcgggcttgatcgggggcgcggtgatatttgtgctggtggtcttgctcagcgtcttttgctggcatatgcacaaaaaggggcgctacacctcccagaagtggaaatacaaccggggccggcggaaagatgattattgcgaggcaggcaccaagaaggacaactccatcctggagatgacagaaaccagttttcagatcgtctccttaaataacgatcaactccttaaaggagatttcagactgcagcccatttacaccccaaatgggggcattaattacacagactgccatatccccaacaacatgcgatactgcaacagcagcgtgccagacctggagcactgccatacgtgacagccagaggcccagcgttatcaaggcggacaattagactcttgagaacacactcgtgtgtgcacataaagacacgcagattacatttgataaatgttacacagatgcatttgtgcatttgaatactctgtaatttatacggtgtactatataatgggatttaaaaaaagtgctatcttttctatttcaagttaattacaaacagttttgtaactctttgctttttaaatcttaaaaaaaaaaaagttgctgaagtactgtacagggttgtacaatgagaacccaatgccaaggcaaaaagaacgagtgatttttccttaggatacacatcaaccactttgctgttgaagctgtcagaataaattcctggtggtcagatgaaagggcagattaaatggactcatcagggtaagaggaataatatgggtaaaacaagaaatggcccgatagtttcacactattcctatacctccaggtccggaagacaggtaaaaaattctataatgtaagaatggaggtagttaccctgatttgaccctgtgtgggaaatgctgaaagcaccaggaggaagccggttcccgtgagataagttaacccggcctgacagaatcaagaaaattgagatgagatttgaaaggacccgaaaatgcaggggttggctttctgactgggaacttaaaaatcactcttcatgcttccctggtcctatgtgataacagagttagagacttgagtctgatttcagtcatcttcagggaccagtctgatgttgtagcaagaagactccctttaaaagtgttactgttcaaatcatatatcaggttgaatcacattcaacagagatatattctagaatacttttttagaagaggctaataaagggaagaattatattgaatggaattatttttgataatgagaattatttgggtagattcactgaggctatgtcaacatgatatttagaccaacaggtgatcaatgtttggaaaatacaacaatgacttatttaaaaattacccttcctgctatttagacaaaaacaactgatcagtggttctgttatgtcagctgactttgttagtatcatgttgaaatagcttgaagtaatatcttttatccccttgcaaattcttgtcttccaatcatctcccatatattttcataattagttgtttatgacacctttgtttttctccctctgttcagtatttcaaggaaaattatggatgccagtcttggctgcacaagatatccattacgtacttatacattttaaaatgagtactaattttcactgctaataattctgtaaggacacatcaaagctggccaaaataatgaattttttttaaaaagcaatacctggtttccaccttggactgactttgatcctgttccacttttgaaattttatttgttccttttccatcgtggatgttcctctactttggcaattgtggagggctaatcaatcttatgttagcaggacaacccatgaaaaacaagtcagagagtgaaggctttttcccctaatcctggcagagcagggcgtagaaaagagaggatgtccgtgcttaattctagatacttttgagacaacaccttcagaaaacacataatttaatctttgccatccttagatagagaagggctatagatcacatacgttatcaaaaactactcccttggaaaaaatatctttcgaaaatcaaatttaaacatttcactctgtgctgcatatttcttttaccattgaccattattatagggacccatgaagtaaatgtcacaatcatcttactagctctctctctctcagcaaaataaaactgtgatgtgtcttctttgtaaaagtttaggtataaaatgctatgcaactttttctttatagtaagagctttattttctttaataatatagcccaacttatatgttttaatctcccttgtccctcagaataagcagaaaatataactgcagctgtatgtcgtagacacaagaattgaaactgtgcagtcagtagagctgaacttagctatgaattaatttaaattaattctaaagtgactctggtttccattttagtctattagctagagggttttggctgttgctttttttaaagttaggtccacacagtgaagggaaaagagtctgtgaaggtgatcagtgtagcagtaagacatctaaaatcaagacaatgacatgggggctttgtgtacttagctggataattcccttctactgtcctcttccccttggctgtgtagataaaattgtgcattcaaatgatggtactttgacttttgagggtttttatttctgttattcacaaaatactcattctcatttatgtatattgtatgtttaacccccagtgggatttctggctgctgaaaccactttgggccaggaagaacaaggatgaagaggttcctgtcatttcttatggggttcacagaattatttggggcttaaatggtacaatggagacagtcatgtgcaatgcttaagatggtctgacagggtcccttttgctggaggtgttcctgaagagattgaacctagtaacaggctttattttcaccttgtgtacaacatggcaaagactgctaagattaaaatccgtctcccatttgttacagcctcacctgcaccaggatagaaagcacgtgatggaatctgtgatgtctaatgtgtcttatgaaaattgccaaacaactgtccctggggattctgctttgattggcatttttagtcatgggaatgtatatttgctgatatatctgctctgtgtttgggcctctcttgctgtcattatgatgtattttgagatgattagtcaagagtcaaggttgcgagtacaggccaagaccatgggaaaaaaagccatgctcactggccaataaagagcttgatgctgcctggccaaatgaggtgactcagatagaatctgatcccattcagagcttggtaaatgtcactgtacagaagacattgaaaaggaagaggcatagtcatgatcaaaaggatatattgacagttatctatagccagggtagttgttaatacctgcttgtttggggagatatgtttgattatagagagactctgggccaccctcaaacaccgtcagatgcattagcagcccactgcatgggacaatcgcaggcagatacgaggaatgtatcccctgcctattttccttgtgtaacaaatggaaaacattctcccctgtgagaaataatgcaatttctaattatctggatgttcgttgaaaatatattagacattctccctgaggttaaaaacaaaaagtacgtgaccagtctggtaagaagtattaatgaagtagctaatattacagcttcattttctactagcacctatcataatggtcttagtcatttcacacaaatcagaacttccttccccaccagggaggacaacatcttcatgctgtgattgaagcatccattcagaacacgaggcaatattgcagtccacagggaatggatgcttcacttgatctccggaccttggctgcagaggccatcgcagcttttgaaaagtgaaggggttaattcccattggtgtctttgcttatagcatttttctctaacctataacaaggagacattacattttactttagaacatgagaatagcagttttgctcatgacttaccattccagctgcatgggaaagcaaagcagaaaacagtgccccaaatggaaaaaagatactcacacagaacaaaacagttcttggtcttgttcttggtcttgtcaaaccttgcctgatgctctttctaaagtcaaaatatgaatgctaagaaggcataacctacatccttctctgatttcttcagcagggtcaaaagacagttactagcaatggggaatgcttgtcactgtggagaaagagttttgtatatgtctgataccgttgttataacaaaacaaatttttttactatagttttttgttttctacctgcacacccaccagaagagcacaaagcaaggccattgcaacaggcatttaaaaattattatcaaacatgcacatgcttgtacacacacacacacacacacacaaacaggggcatttgtaaaggtgtccctggaatgtaagatttataatgtttaaggcaaggtgaaggcattgccaagtgtgtgtcgctcataggactagtgtatattcactgaaagttaacctgatgatttgttattgtttgaaccatatgctgatttgcttctggtttctgtttagtgtgttctctctgataaggggctgaaagattctgcatcacacatcctctgagacctaccatgtcgcacactttgttaatgacaaacttcactctacactatacagtaccttgttgatatattcagtaaagtcttattttaaaagaaaaccaaaaaaa

SEQ ID NO: 346 - DNA, 12521 bp, Homo sapiens
ccaagtgtgtttgctgtgcggctgacagcctgactcccgggtcctgttgctctctgtcctgtaaattaagagcagatggagtggataaactgagagcgcaggagaaggtaacacaagtcagaacttccaccaagggcattactgagacatggagaacgttgataattctctggatggcagtgatgtgtcagaaccagcaaaaccagaagccggacttgaagtggctcagtcgatcctgagtaagttctctatgaaatccctatttgggtttacgagtaaattagaatctgtgaatccagaagaggaagatgctgtgctgaaagcattccatagtttagacgtgaatcccacatctcagcaggatgattccagcaatggcttggatccacaggaagcagggtctcgggtttcacctgacctcggaaatgatgagaaaattgcaagcgtggagacagaatcagagggaagtcagagaaaagaagcagggacatctctccttgctcaagagctgcttccactgtctactttgaaagggacaaaagacgatgtcatttgtgttcgtgggaccctggtgcacaccaccagtgattctgactctgatgatggtggccaggagccagaggagggaagcagcaccaatggcccaaagtcccctagtggtgttttatctgagccatctcaggagtccaaagaaaacccaggaggtttcagggaaaatactgtcactggggaaatgaatggtgcagagctctgtgcagaagatcctcaaaggattccacctgagatgagcagcaaactggaagctggcaacggtggtcttcagacagagcgtcgccccagccaggaccaggtgggagaagaagggtcccaagacctacctgcagtaacaaaccagaattcgagtgttggtatcactgagagtgcctcttctaaaaaagaagtctctggagagaagtcattccaacttccagcttttttcagtgggcttcgtgtgctgaagaagggggctaccgctgagggaggagagaccatcacggaaattaaaccaaaggatggggacttagctttgctcaaattgacgcagcctgtgcagaagtccttagtgcaggcagggctgcagacagtgaagagtgagaagaaagcaactgatccgaaggccactcccactctcctggagcagctctctctgctgctcaacattgacatgcccaaaactgaaccgaagggagcagaccctgagtcgcccaggagagaagagatgggctgcaatgctgaccaagagagccagagcggccctggagtaccacaaacccagggtggtgaggtcaagccaaagtcgccagagacagccctggaggcttttaaagccctattcatccggccccccagaaaggggaccacagctgacacctctgagctggaagctctcaagcgcaagatgagacatgagaaggagtcgctaagagctgtgtttgaacggtccaattctaagccagcggatggcccctctgattccaaaagtcctgaccacagcctgactgagcaggatgacaggactcctggcagacttcaagctgtctggccacccccaaagacaaaagacacagaagaaaaagtgggactgaagtacactgaagcagaataccaagctgctattttacacttgaagagggagcacaaagaagaaattgaaaacctgcaggcacagtttgaacttcgggcatttcatatccggggcgagcatgcaatgataacagcgagactagaagaaaccattgaaaatctgaaacacgagctagaacacagatggcgagggggttgtgaagagaggaaagatgtgtgcatttccaccgatgatgactgccctccaaagaccttcagaaatgtgtgcgtccagacagacagagagaccttcctcaagccctgtgaaagtgaaagcaagacaaccagaagtaatcaattagtacccaaaaagctgaatatctcctctttaagccagctctcacccccaaatgaccacaaagacatccatgcagcactccagccaatggagggcatggcatcaaatcagcagaaggcattgcctccgcctcccgcatccatccctccccctccgcccctcccctcaggacttggatctttgtctcccgcacctccaatgccacctgtgagtgctgggccaccgctaccacctccgcctcctccaccgccacctctacctccaccttcaagtgctggacctccaccacccccacccccacccccacttcctaactcccctgccccacccaaccctggagggcctcctcctgctccaccacccccaggacttgcacccccacctccccctggactcttctttggacttggctcttcttccagtcaatgtcctcgaaaaccagccatcgagcccagttgtcccatgaagcctttatattggactaggatacaaataagtgataggagccaaaatgctacaccaaccttatgggactccttagaagaacctgacattcgggaccccagtgaatttgagtatttattctccaaagacacaactcaacagaagaaaaaacctctgtcagagacttatgagaagaaaaacaaggtcaaaaagatcatcaaattgttggatggaaaacgatctcaaactgtgggaatcttgatatctagtttacatttagaaatgaaggatatccaacaggccattttcaatgtggatgactccgtggttgatctggagaccctggcagccttatatgaaaacagagcccaagaggatgagctggttaaaataagaaagtattacgagacatccaaagaagaagaactgaagctgctggataaacctgagcaatttttacatgagttagcccagattcctaattttgctgaacgtgcccagtgcataatcttcagatctgtcttttctgagggtatcacctccttgcacagaaaggtagagatcatcacgcgagcttctaaggacttgctgcacgtgaagagcgtgaaggatattttagctctcatcttggcttttggaaattatatgaatggaggaaataggactcggggacaagccgatggatatagcttagaaattctgcccaaactcaaggatgtcaaaagtcgggataatgggattaatctggtggactacgttgttaagtattacctgcgttactatgatcaggaagctggaacagaaaagagtgttttccccttgccggaaccacaggatttctttctggcctcccaagtcaagtttgaagacctcataaaagatttgagaaaactgaagaggcaactagaagcaagtgagaaacagatggtggtggtgtgcaaggagtccccaaaggagtatctccagcctttcaaggacaaactagaggagttcttccaaaaagccaaaaaagagcataagatggaagaaagtcacttggagaatgcacagaaaagttttgaaacaacagtacgatattttgggatgaagccaaagtctggtgagaaggagatcacacccagctacgtgtttatggtgtggtatgagttctgcagtgacttcaagacaatttggaaacgggagagtaaaaacatatctaaagaaagattgaaaatggctcaggaatcagtcagcaagttgacttcagagaagaaagtggagacaaagaaaatcaatcccactgctagcctgaaagaaagactgcgtcagaaggaagccagtgtgaccactaactaagatgaagacacatggaaatgatggcactggaggtggaggaccttgcacgcatactctttgtgaccacagggttgcaggacgttcttgaaagatgtgtcactaaatgtttgtttttgctcatctctttctgaggtcatctgcagagagtgccccatgccttctttaagaagtccctcattaagccgcaggaacaatggaaaactatttaagggaacattgcagaaatatttgatgactgtttcttgtggaagcccaaagtccactctaagagcagaagaaataccaaaatgtttccaaaatttttttaaaagctgagatttccagctttataaccaaagcttgatatatgtcacattgtcacagaagagagaaaagatcattgaggacagttgccttgggagagttcaagtctttgtcgttacacactgctgttttgattattggtcttagttttgatcctgttgcagcaaaatcctgcagcatctttctctccaataatgttgcaactcaccaaaactattcttgaagaggtccaagaacatgtattatccagactaaaaaaatgattttttgttgttatggtttacgtgatgaaaaggagaaaaaacagaatcatacctgggtggagagagggagacaaatagccataaacttcatcctggagaacaagttaccatgcaaggagttgacatcagttgttaagtgaggcccattcttgtttttacatcggtcctttgtggtttttctgggccagcagagattctgcaccccaactcccaggagaaaatgtaatacctgagcaagcacagccttgggtgtgcttggacaagagacccagcggcagagcaccttttacattttggaccgttcatgaatgggcaatgttgtgttgatacgcagccgagttctacgttatgtgctgtgactgtgcagctggacgacccccatccccaggaggcagtttccagacaggagagcaaatgcaactcacagcacctgctcatgaccttggctgataggcatgtgaagtaggatgaagcaggactctttaatgtcaaaaaaactgaagggcagaaaaaaggttccttacatcaaaatgaaagtaattacattaatagaaaacttccaagtggaatattgttcacaggcagctctttctgaccctggctcttgagtcacataaggaaaccacctttgacctctctgacacttttgtctttaagccacgtctctgaaatcttgtgaggggtgaagaaagaggactggagatgaatggacaatatgatcaaagactcatttttaggccttgaagaggccgagctttctccccccaattggtggaggacagtccagagatgagcagaaatcttaaattccttcctgatccagcctccacatgtggcctgccccttgccccagcatctttccagaacccctggacttgccaggtgcctgagcatcttcccaggatatgcctgccagccagcagcccctcaggaatgcttctataatagatccagtaatgaaagcagcaccatatcctaatctaatgtcagcttcgagaatgaagactgcagtcaggatcaaatcaagtcacagaagccatattcatgcaggtgctaaccgccttttctactggtgcaactgaaaggaatatggtaacatggttggatttttaaaattcacaatgaaggaacgagacaagcaaaacagaaaagccgagaaggaacatgcatgactaaaaaggcttgaagttgcttgtgagcaagaagctttttatgctgctttcttacatagtttctcttcattttcacttaactctgaagacaaccaaaagaacggatcaattaaaaactgattccacttataaccattgtatgctccttctagtgttatcatgcacaagaaaagtgccagttttacccatgccatataattcagctcttttgagttatgtggggccagcagaagtctcaatccttataggcttgatggtgagagcagcgggaggtttgaggtgtactcattgcagtccactttggtctgtaagtaggatgcttacgagaaatcagtgaaggtaagcagggctgccactgtggccacgtaacccttcaggaaccagtgctgaagaataatgagtgagaacacttaatttgagagttagacaaatacagcccactttggatttcatcctagtgaacagactaaaactttgcagtaaaatacctatttctacaaagcaaggtttgcctgcctcggttggggaaacctagtggttttgtcacactagtcgatgtatgatgttagtgttgtaagacaccatggcagaatcttcattattctcacctattctgaaccctgcatcatgtatctgggatgccccctcccaagtccaccaatgtaccacgttgctgacacagccttcatttttaactcaaattgatgctcagtaaaggtcaatgacaatttgttcaaggaagttcatctaaaataatctggaggccttgaaaatgatccctctaaaatgctgttgagcttgtgttcagtgtagcaggaggatctgaacttttcctggagaggaggtgatcgggatgccatttggcagcttaagcacatcctgccagcaggctttaagtggctgttctaggcatagccctccctgaactagaaaggagagtaaccagtttgctatgctgcatctaaccagacacacctgacttagtagtaactctaagaacccttaacttacaaacaactttgtctcctcttagacaatattcattaaatctgaggacacagtttgacagtagttcagattcttgcatgagcaattgacagcatcagagcacacaatatcataagttacataaattacacaaagtacatcataaattacactacagacacgttaggtaaaaagcatcaggcccgggccgggcgtggtggctcatgcctataatcccagcactttgggaggccaagcgggggcggatcacgaggtcaggagattgagaccatcctggctaacacggtgaaaccccatctctactaaaaatacaaaaaattagccgggcgtggtggtgggcgcctgtagtcccagctactcgggaggctgaggcaggagaatggcgtgaacccaggaggtggagcttgcagctagccgagatagcaccactgcactccagcctgggcgacagtgagactccgtttcaaaaaaaaaagcatcaggcccatgaagtatcaaaaaccaggttaggaggtgtgctgtatggcttttatctcaataagtggcagcttactggggaaaaagaaataagaaaaagtgtggccaagcagaagtggatgtttatgatgacggtgggggcccagaggtcataggtgatggtcctactgcccaacagttgccttttgaatccttatgttgatgatggtgtctttctacacactcactgcaactactcaggaattataaagattttctgaaatctgagaagtggaataaggaaacccagtggagctattacacttttaaatgttctagccaaaacaaattgccagtatggttgaggaattgaatatcagatggcatgcagtctcccctcccctcccctatcaaggacagtagaagctgcaaacctcttctcagcctccttcaggcacctcctgttttcataagcaccatgaagaatggtgtttcctaaatgaaaagttcagatactgctggtaaagaaactggaaaaactgaaggaaggaataaaatatgttggtggtattaacacctccagtaagataagtcattggtacggtttttctaagggccgcagtgagatgtagcagaagaaatatgtttattttgggcaaagatttgcttattggcctgggattgcacattttctctatgatgtttgcaacagagaaattttcattttaatgatactcttcctttcttgaaagttacatgtcctcatttctgtttctgcttctcccttggccagtgtcattgatgcagatcattgcatacaacagcacagcaaattgcgccaagtcagtgtgtgaatgggaattagcaatgcacgcttgcaggctctttttccaggaaccaggctgtaacattgaccggggaacctcttcattccctgacatactaaattggtcaattttgtagtactcatctccatccacaaaaacaacaaagataaaatcaatttggagctttatatgacaaaaaggaagaagtccaaaaatatatagccttcccccctcccacatatctgatccaaatattaaatatctgattttataaaacagtttaaattgtctttttaaattgctaacaagcatcagttatatttgagcttcatttttcttttatcctgtctgtcctaataaaaacaaaaatggccaaaaagtggagaggaaagaaaaagcttccactttttaaaatttgttttgtattagttattttacctttagggaccctacaactgaagagagtggagagaataaagaagtgaactttcattcatgtctgctactttgacctcataaagaaatctgcaacacagatgaaaccagtctgtgtggccaagctgatgggatttgaaaagagtggataatttttagcctttccaaaatgcaaataacttggatatatttccattttccagctatagagagaaacaatccagctgcctggaaactgttattagtatagaagtggcttaaagaaaagcatcttcaaatacttgacttagcatatctttcttctttagacttacataatgatattcatctctccattagcaattgaatccaggcataaccgggctcagttacacagcttgtctgtgactgggaagcccattttgtgtcatttctgcacacctgtccgctgttgacaccttattagaggcactgcattttggtttcacaattcttcatctcccttcccaaggaatgggcaatctactgaacttccagatcaatgctttgttggaaagtgatgaatttaagagagttttaacatgtcaaatttgaagccaattcagtatccttatttgttccaagactcttaaccaatactgtgatataaagttaggatttgggaaacgtgtagttaacaacttggaaacatgaagatattaaaatggcagctggctaactgtctcttaagccactatgcaatttctaccaatggagagattagggaagcaaattaagcctcattcagtaggtctgctgtctggtggaacttacggaactcatttcctcctctatccccagcccttctcctaactatggtgataaccagggccatagaagaccttttctctcttacctttctctgataggatcgtgtccttcagtcaagagctcatgtgaactccagactttatattacatctctgaagttcttgatgtggggaagattgacttttattccatttttatatgaaggtgttagatatagccatcaatttatttttctacattccctctacgcttatgtaattttctatttttaaatcttctcttaaatatactgagaatctctagtctccttttctaaaggctgatccaactacacttgtgggctatttttccaagctttgtgtgaaacttgatgacattgggccagcaaaatgcaaagaagactatagtttcaggcagaaaatcacgtccaaagaatttggcatggattaaacaacctctaccacactatagctctcacataggctgaacattttcctaaattctacctgtgcagacactgaggggctctctacctttgaaactatgagaacgtcttaaattaatatgaatatttctctccatgtatagtgtgagctgccaatgcattatcttaatacatcaagaaggaaatcagatttcaggcacacattagcaattgtttgttaatgtccttggcaaacgtgtacctgctttccttcattgttctcttcaggggctttcttccactttcctcttatgaaacgaatgtgtttttgactgttaactgggttcgctttccagatctgtctttcccaaatgaaaggttagtcccatagaccactggctattcagggaaattactctctacctccccatgacatggatgataagtgttgagggatgaacactctggaaactcttagcatggattttgaattccagatttctttataggagatgtataaaaaggagtttatagcatacaaaaattatactgctcttcccagtaagggactaaaaggacatttgaaatctttacattttagatgtttttgtgaattataaatatctcctttttcctcgcttcatgctaacttgtctctagataaaatcttatttcttcatacattggaccacaaggcataaagaaggtagctcagcgccactgagattgtgttctgcataatatttggaaggcttccatttccattgaaaacaaatccatgagtgagagggaaagtctagtatcaattcttctgtttgctcgcaatgacacaaataggttttggggatctacctaagggataggtctactccaaaattattaaatttataattgtgcaattctgtaatttcccaaggcataagtaatatgaccctactgtcagctagatgtcttatcttcaaagagagtatgcattaataaaaagaacttccctttaaagaaccaatctaaaatactaaaaaggcagaaacttttaaaattagaaattggataatttttaagaatctttagagaaaacattggtttatcatagtctttttctttcattgagttttcatttagactagcatggcaagcagggtggccttggactttgatttaggggatcgtgctttggcctggaaaataagcactggcctgcatgcctagaacctgagtgaaggcagtcaacatcctagtatgaatcagacctagcagaaatgtaaattatttcaagtacttcagggtttagttttcttagtgacaccctggaccctggatgctgctttctaaagtgcacctgatccatgcagttttatgtcttcatataactggtatcttgtgagtttgcaagcaatgggatgagcaagaaaaaaaggacgcatggaggagaaaaatttgaacgaggctagtgcaatgttttgctgatagattacattgttagggagctggtgattttttgccatggtcgtatcgtggacagcttttccgtggaaattcaaggcatctgtattaggcaaatgtgagtgcccttgatcttgtattgatcagtgccaatgtactgggaaagcaggtaccccagtgaaactggtctgtgcttggtttaacagctccaacaatttcagatccatggggctgcttgaccatagaccctgtttactccatgcctgttcaaaagtcattttgacttctagctttgtttcactttcttctttcaatacttctgtttcctcgtccttttccttcatattccatggctatttctttcctactttacagtttcccccagacccagattttttcacacctctgcatcatagacaactgagtagctcccttggcccctcctccatcctctcacaccctgtgctccgttcctcagccgtttggacagggagctccgctgtcaccaaggagcccatgtgagacacactgctgtgactgcctcttgttaatgtcagcatcacctcatcacttaagcaaaaaggaaaatccataaaagagatggaaaatacgtctctttttattttattttaagaagattgggcggggtggggggggggttcttattctaggccttctcaatttctcatagattttaccttaaactaattaaggccattctcttgataaatttgtacatcagaccgggtcaccagctatgatgcagaacgccagatttttgaatctcaagtaactttctgtggtgctggacaaattgacttaattctgtgcaggcaaacactttgaatcataaggatttttattgccgctccattcttactactattcatgattcaaacatctacccctgttctgaatcaggatgttgacacttcttggttattttcagatgaacagtaactgctacactcttgaaagcacttaaaagtgcaagcatgtcctaaatagccatttaacctggtaaaacataggcttttctgtttaattaagtattagaccagtctgtagatataatctgaaaagattgtaggcagtaatgaagacagttggggaaaggagaaggccctttaaagacatgaaaccttacacgctcttgggatatttttaagcataataagctcattggattcaggtatttttccctttgcatttttaaaaatacgtatttctaatttgtttgcatatttaattttgtcaaagctgagaaatgctcatgagttgaatttataaatgtcatttgcaaccaaatgaagtatttatttttaaaaagagagtgaaggaaccaacactgatttgtacataataaaaatgtgtgtattatatatatatattttttcctccttgacagtacttggtcacaatatcaagtgtatttttgtacataatatatattgattagaaaaacgtcaattgtctattcaaaaaattctatctctgtgatagattatatttatcctaatctgttgatacctctgttaatttgttttaagagaattatattttttggaatttacagagaattgcattcatggctttcaattgtaaatatgctaagggtattttaataaatcttggtttcatgtccaaaaaaaaaaaaaaaaa

SEQ ID NO: 347 - DNA, 5472 bp, Homo sapiens
ggggatgtggtgctgccggggccgccactgcagctgctgctgcctgctggttgccgcgtcttcccggaggcgactgctggaagctgcagggaacagctgcggtgctctgccatattgtgtcttccccggccggtccctcgcctcccggccgagctgacgttggttgaagccatggataacagaacccacagatgcagagggctgactgtacaagtctgtcaaaaaaccaaactgctggttggctaataattggtcactgtatgacttatagtacaggtgatattacttctgattctagatgaactgtaagagtaaatgggtccagtaattggaatgactccagataagagagctgaaaccccaggagctgaaaagattgcaggattaagccagatttacaaaatgggaagcttgcctgaagctgttgatgctgccaggccgaaggccactctagtggacagtgagtcagcagatgatgaactcacaaacttgaactggcttcatgaaagcactaatcttctaacaaacttcagcctcggaagtgagggtcttccaattgttagtccattgtatgacatagagggagatgatgtgccatcctttggaccagcttgctaccagaacccagaaaaaaaatcagcgacttcaaagcccccatactcctttagtcttctcatttatatggccattgagcactctccaaataaatgtttgcctgtcaaagaaatttatagctggattctggaccattttccatattttgctactgcaccaacaggctggaagaattctgttcgacataatctgtccctgaataaatgttttcagaaagtggaaagaagccatggcaaggttaatggaaaaggttccttatggtgtgttgatccggaatataaacccaatcttatccaggcactgaagaagcaacctttttcttcagcatcttcacaaaatggttctttatcacctcactatttaagctctgtaatcaagcagaaccaggtgcgaaacctcaaagaatctgatattgatgctgctgctgcaatgatgcttttaaatacttctatagaacaaggaattttagaatgtgagaagcctcttcctcttaaaacagcattgcaaaaaaagaggagttacggcaatgcatttcatcatcccagtgctgtacgattacaagagagtgattctttagccaccagcattgatccaaaagaagatcacaattacagtgcaagtagcatggcagcacagcgttgtgcatccaggtctagcgtgtcttccctgtcttctgtggatgaggtatatgaatttatcccaaagaatagtcacgtgggaagtgatggcagtgaaggatttcacagtgaagaagatacagacgttgattatgaagatgatcctcttggagacagtggctatgcatcacagccttgtgcaaaaatctctgaaaaagggcagtcaggcaaaaagatgcgaaaacagacatgtcaagaaattgatgaggagctcaaagaggcagctggatctctgctccaccttgctggaattcgtacatgtttaggttccctaataagtactgcaaagacacaaaatcaaaagcaacggaaaaaatagaaatacttaaagtgtggcaatactctttcacttaattctttacaagggatatcaaagccataatggacttcattagttttagggtagggaagggatactaattacttatttctttcaaaacatttttggtttttggtttttaaaatttttattaaacaattgctgttaggatcatgcctgatcagaaatacatgatgtgaagtcctaaaagcataatttttgtgataaatgtgtccaagatttgaaaatttttatataagaaaatccccagcctctgtcttaaacttgtgggacaaaaatcctttcttctgttaatatgtcagaatgtaagatttggcaactcgataaatttttttcattttcttttccaatctgtaactatagttactgaaccagctaaaaattttgctgatgtatttttcatatacttctctcctgacacgcaatccggtaacataagattgaaatttttttactttgtcttaatttgtttctaattttttttttgttgtcgtgtgagcaaagacaaacataaattgaaaaacatcctgatgtttagaaagtttcttttggttacgtaggtagagaatacaacaaagagttctaagacttagaaaagacaattttgtggtgtcatttcatccaagaacactcccaattcctattagaatggtagctttgaagtgtttttacttcagagatcctgcatagcatttattggggccttttattctttcccaaagtgctttgcaaacattaagttttagccactagctgcctttgttgagtataagttatccagtgagaggatatagccaattaagtgtgttatggagtacacccattttgacacacttgtaataagagaatctttcatttgcctgccatgtgtactgtattatgagaatcttataatcggaatggagtgaaatgaaacattttgagtactgatggcatgttatcatacataaagtaggtcatttaggaaaaaacttctgtccaagctttgtatgaattaaattcataagtataccaaattaaatcttaatagatttaatgcaattttacagacacaataccttcatgaatttcaaaattcatataaaatttgatcttatgcaatacacctttttgaggaggcagtgtaacaacctatagtgccattgatccatgagaaaaagattttctggtactactccaaaagtgctttgactaagtatcttaactatttgaacagtctgcttatatgagacagtttttcatagtatcatttgtataatttgattagattattcagaaacaataggatgctaaactaattcattgtatcttttttttacaatggtggaagcaactttctgaaagttcagtcttatgctacatcctaagtcatagacaatgaccttgttttcattattctgatagattgtatacatatgtacacatacatatacacatatgcacagtcaaggtcatgatgttgatttgctttcagctgtttctgtgattataaagcattttttaagagacaaattttaacttttaatttttattttggcaaaactgtcaaatgagaaaaatgattttaaaaacttttttttcaattgacaagactttaagtcagggataacagtattaatgttctctgttctgtttccatgttaaatttaatttaacctggatagccacattaatgaattggtgctgtcaaaatatagtaatttttaaatttgttaataatgaaaacccttaagcatgcaggatgaggtatttgggttttttttttagatcgatcacatctacagaaaatggctaaaccaagttaacttttattatagacagtgaataaaacaccaaaaacccaaaaatgctttaaccacagtataaataatagattatacacatcatcttaataactatttttaagttatttaccatagcctctgtatagaccttaggaacagtgtttcagtgatctggcaccagtttattttgttctgctgaaattctgtatcacaaatgtgctacctggtttttgtccattagataattactctttataaggaaaggaaagagaagcagagttagttccagctctaatagggatcttcaaagttattttgtcttgatgtatgtaacagtaattctttacatcttttgatttttctcttcctttttattcactcttcccacgaatttaaatgtttaagttatattcatcactagcaaggatgataaacacttgtgcactgaaagctaacagggagaggttacacaatattttacagtttcttaaacataatttaatgcatcaccttccacttgctaacataccaagtcagttattttcaagggaagaaccttttaaattatggtcctccatttactacttccactgagagtatgctctcattcctcaggtgttttgagaaacatgactaataaccacacaattaagtagagtcattccaagtcctatggcctggaaattgtattccctataatatacaaattttcctgtaataaagtcaacttagaaactccaaggaggttacatgttttccaacatatcctaaaaactgtgatataagctaacatataatttgccttacgtcaaaagaatatgttttgttgcagctgattccagtttataatagatccctagtaaaaagctttgattcaacacaattgttcatcttcacatcccaaacagaatcactgtttcttgaatatatatttttgaagtttttttgtgcaatatattactaaatcagttattattttacttttccaaattcagagaaagaaaacagattacctgaattcatggaaaaggtggatcacctccctttttccaccttcaagcctttcctgtcctcatagccagcatgacttcttttaacttggattcctttgtatatagtaaagtttagtatatatatatttttttctttttgctactttctgaggcattatgtaaagggctcatactagatgttcagttaaatatactttagcacaaagtcaaactagagaatgtgttaaggagggaatgtatatgtcttggtagaccaggaggcctttgccagcaatttaagcaacagatgtgaatacttcacaaagctgtaaagaccattgtcttaaatactacaacaacttaacacccttttgtgaagatcacagcatttatctaagaaactgtgaggctttctggtttacatatatcttacaggtgtttttttgtatttttttttttttttagtttgaaatgtgtaagctttgatttaaaccaagtttacttcagtatgttaatgatgtagtaaaaatatttattgaaaggtgaattcgagtattttaatgttatacctgccattttttttcttaaagcatattctttgcatctaactgccagtgccattgtcaaaacttattttttaaatcgttgtacatttcttattaaactaagtgcttaattttaaagtattatgttgccatcatatagtgtataaaaatgtataattgccaattgattgtaactattatttatttttaaatgaaagtgtaagaatgctttctgattcaacaaatttgttatcaaactgtttccttatcctcttttctgatgtagcataaaaattgtcccggtttgagttataactgccagtagatgaccagtcacaagtgaaccacttctcagttgccaatctttgctcatattaaaaacaacttacaaatacttagtttttgtatctaatctctgattattaaaatgtttataaagtttatttttaccaaagagatgcaattcattatgagaaagtattgcataataaattttgttttataacttttaaaaaaaaa

SEQ ID NO: 348 - DNA, 3840 bp, Homo sapiens
aggagaatggggaggagctgggggggcaggcaggcggggaaggagaggtcttaaggggcggcgaggggaggtcgcatttcctccgaggctggcgatcggcggagctcccacctccgcttacagctcgctgccgccgtcctgccccgcgcccccaggagacctggaccagaccacgatgtggaaacgctggctcgcgctcgcgctcgcgctggtggcggtcgcctgggtccgcgccgaggaagagctaaggagcaaatccaagatctgtgccaatgtgttttgtggagccggccgggaatgtgcagtcacagagaaaggggaacccacctgtctctgcattgagcaatgcaaacctcacaagaggcctgtgtgtggcagtaatggcaagacctacctcaaccactgtgaactgcatcgagatgcctgcctcactggatccaaaatccaggttgattacgatggacactgcaaagagaagaaatccgtaagtccatctgccagcccagttgtttgctatcagtccaaccgtgatgagctccgacgtcgcatcatccagtggctggaagctgagatcattccagatggctggttctctaaaggcagcaactacagtgaaatcctagacaagtattttaagaactttgataatggtgattctcgcctggactccagtgaattcctgaagtttgtggaacagaatgaaactgccatcaatattacaacgtatccagaccaggagaacaacaagttgcttaggggactctgtgttgatgctctcattgaactgtctgatgaaaatgctgattggaaactcagcttccaagagtttctcaagtgcctcaacccatctttcaaccctcctgagaagaagtgtgccctggaggatgaaacgtatgcagatggagctgagaccgaggtggactgtaaccgctgtgtctgtgcctgtggaaattgggtctgtacagccatgacctgtgacggaaagaatcagaagggggcccagacccagacagaggaggagatgaccagatatgtccaggagctccaaaagcatcaggaaacagctgaaaagaccaagagagtgagcaccaaagagatctaatgaggaggcacagaccagtgtctggatcccagcatcttctccacttcagcgctgagttcagtatacacaagtgtctgctacagtcgccaaatcaccagtatttgcttatatagcaatgagttttattttgtttatttgttttgcaataaaggatatgaaggtggctggctaggaagggaagggccacagccttcatttctaggagtgctttaagagaaactgtaaatggtgctctggggctggaggctagtaaggaaactgcatcacgattgaaagaggaacagacccaaatctgaacctcttttgagtttactgcatctgtcagcaggctgcagggagtgcacacgatgccagagagaacttagcagggtgtccccggaggagaggtttgggaagctccacggagaggaacgctctctgcttccagcctctttccattgccgtcagcatgacagacctccagcatccacgcatctcttggtcccaataactgcctctagatacatagccatactgctagttaacccagtgtccctcagacttggatggagtttctgggagggtacacccaaatgatgcagatacttgtatactttgagccccttagcgacctaaccaaattttaaaaatactttttaccaaaggtgctatttctctgtaaaacacttttttttggcaagttgactttattcttcaattattatcattatattattgttttttaatattttattttcttgactaggtattaagcttttgtaattatttttcagtagtcccaccacttcataggtggaaggagtttggggttcttcctggtgcaggggctgaaataacccagatgcccccaccctgccacatactagatgcagcccatagttggcccccctagcttccagcagtccactatctgccagaggagcaagggtgccttagaccgaagccaggggaagaagcatcttcataaaaaactttcaagatccaaacattaatttgtttttatttattctgagaagttgaggcaaatcagtattcccaaggatggcgacaagggcagccaagcagggcttaggatatcccagcctaccaatatgctcattcgactaactaggagggtgagttggccctgtctcttcttttttctggacctcagtttcctcagtgagctggtaagaatgcactaaccttttgatttgataagttataaattctgtggttctgatcattggtccagaggggagataggttcctgtgatttttccttcttctctatagaataaatgaaatcttgttactagaacaagaaatgtcagatggccaaaaacaagatgaccagatttgatctcagcctgatgaccctacaggtcgtgctatgatatggagtcctcatgggtaaagcaggaagagagtgggaaagagaaccaccccactctgtcttcatatttgcatttcatgtttaacctccggctggaaatagaaagcattcccttagagatgaggataaaagaaagtttcagattcaacagggggaagaaaatggagatttaatcctaaaactgtgacttggggaggtcagtcatttacagttagtcctgtgtctttcgacttctgtgattattaaccccactcactaccctgtttcagatgcatttggaataccaaagattaaatccttgacataagatctcatttgcagaaagcagattaaagaccatcagaaggaaattatttaggttgtaatgcacaggcaactgtgagaaactgttgtgccaaaaatagaattccttctagtttttcttgttctcatttgaaaggagaaaattccactttgtttagcatttcaagcttttatgtatccatcccatctaaaaactcttcaaactccacttgttcagtctgaaatgcagctccctgtccaagtgccttggagaactcacagcagcacgccttaatcaaaggttttaccagcccttggacactatgggaggagggcaagagtacaccaatttgttaaaagcaagaaaccacagtgtctcttcactagtcatttagaacatggttatcatccaagactactctaccctgcaacattgaactcccaagagcaaatccacattcctcttgagttctgcagcttctgtgtaaatagggcagctgtcgtctatgccgtagaatcacatgatctgaggaccattcatggaagctgctaaatagcctagtctggggagtcttccataaagttttgcatggagcaaacaaacaggattaaactaggtttggttccttcagccctctaaaagcatagggcttagcctgcaggcttccttgggctttctctgtgtgtgtagttttgtaaacactatagcatctgttaagatccagtgtccatggaaacattcccacatgccgtgactctggactatatcagtttttggaaagcagggttcctctgcctgctaacaagcccacgtggaccagtctgaatgtctttcctttacacctatgtttttaagtagtcaaacttcaagaaacaatctaaacaagtttctgttgcatatgtgtttgtgaacttgtatttgtatttagtaggcttctatattgcatttaacttgtttttgtaactcctgattcttccttttcggatactattgatgaataaagaaattaaagtgatggttttattggtttcctttcccccaattaaggccaaataaagtcgtgagaacattacccattta

SEQ ID NO: 349 - DNA, 1407 bp, Homo sapiens
acgtgctggcggctggccaatcatcgggggcggcgcggggaggggtggtgtggacggagaaagtgaaaggtgaggcacggccctgcagattttccagcggatcccccggtggcctcatgtcgcgcagtggaaccgatcctcagcaacgccagcaggcgtcagaggcggacgccgcagcagcaaccttccgggcaaacgaccatcagcatatccgctacaacccgctgcaggatgagtgggtgctggtgtcagctcaccgcatgaagcggccctggcagggtcaagtggagccccagcttctgaagacagtgccccgccatgaccctctcaaccctctgtgtcctggggccatccgagccaacggagaggtgaatccccagtacgatagcaccttcctgtttgacaacgacttcccagctctgcagcctgatgcccccagtccaggacccagtgatcatccccttttccaagcaaagtctgctcgaggagtctgtaaggtcatgtgcttccacccctggtcggatgtaacgctgccactcatgtcggtccctgagatccgggctgttgttgatgcatgggcctcagtcacagaggagctgggtgcccagtacccttgggtgcagatctttgaaaacaaaggtgccatgatgggctgttctaacccccacccccactgccaggtatgggccagcagtttcctgccagatattgcccagcgtgaggagcgatctcagcaggcctataagagtcagcatggagagcccctgctaatggagtacagccgccaggagctactcaggaaggaacgtctggtcctaaccagtgagcactggttagtactggtccccttctgggcaacatggccctaccagacactgctgctgccccgtcggcatgtgcggcggctacctgagctgacccctgctgagcgtgatgatctagcctccatcatgaagaagctcttgaccaagtatgacaacctctttgagacgtcctttccctactccatgggctggcatggggctcccacaggatcagaggctggggccaactggaaccattggcagctgcacgctcattactaccctccgctcctgcgctctgccactgtccggaaattcatggttggctacgaaatgcttgctcaggctcagagggacctcacccctgagcaggctgcagagagactaagggcacttcctgaggttcattaccacctggggcagaaggacagggagacagcaaccatcgcctgaccacgccgaccacagggccttgaatccttttttgttttcaacagtcttgctgaattaagcagaaagggccttgaatcctggcctggaatttgggcagatatagcattaataaaactgtgcatctcaaacttttatcacatactctaataaa

SEQ ID NO: 350 - DNA, 7644 bp, Homo sapiens
ggcagcggcgggagcggcttctgcctcggctggagactgaggcgaaggcggcagcggcggaggaggtggaggagaggcgagggtgaaggcgatggcgacgcggggcacatgaggccgcgaccggcgggacgggccgaggcccggcggaggaggcggctccgggggaacccgccgccggagggaatctggaaaaattgcaatcaaaacatcatttctctaagaaaattttgggtaaccgaagttctggacaacagggcataccaattcaatcaccatgagttggagcttcctgactcgcctgctagaggagattcacaaccattccacatttgtggggaagatctggctcactgttctgattgtcttccggatcgtccttacagctgtaggaggagaatccatctattacgatgagcaaagcaaatttgtgtgcaacacagaacagccgggctgtgagaatgtctgttatgatgcgtttgcacctctctcccatgtacgcttctgggtgttccagatcatcctggtggcaactccctctgtgatgtacctgggctatgctatccacaagattgccaaaatggagcacggtgaagcagacaagaaggcagctcggagcaagccctatgcaatgcgctggaaacaacaccgggctctggaagaaacggaggaggacaacgaagaggatcctatgatgtatccagagatggagttagaaagtgataaggaaaataaagagcagagccaacccaaacctaagcatgatggccgacgacggattcgggaagatgggctcatgaaaatctatgtgctgcagttgctggcaaggaccgtgtttgaggtgggttttctgatagggcagtattttctgtatggcttccaagtccacccgttttatgtgtgcagcagacttccttgtcctcataagatagactgctttatttctagacccactgaaaagaccatcttccttctgataatgtatggtgttacaggcctttgcctcttgcttaacatttgggagatgcttcatttagggtttgggaccattcgagactcactaaacagtaaaaggagggaacttgaggatccgggtgcttataattatcctttcacttggaatacaccatctgctccccctggctataacattgctgtcaaaccagatcaaatccagtacaccgaactgtccaatgctaagatcgcctacaagcaaaacaaggccaacacagcccaggaacagcagtatggcagccatgaggagaacctcccagctgacctggaggctctgcagcgggagatcaggatggctcaggaacgcttggatctggcagttcaggcctacagtcaccaaaacaaccctcatggtccccgggagaagaaggccaaagtggggtccaaagctgggtccaacaaaagcactgccagtagcaaatcaggggatgggaagacctccgtctggatttaatcctggcgggcttaaaacctgtgcttttcatagtttatggtaagcagcagctcactgaataatgacttccattgagtaaacatttggctctggttatcttcagggatgctgttggctcatgatccaagctcaggggactctggaggcggggctgggctgagggagagaaagggaaacacagtgttcccaggcacatgttcttagcaataatacagttgcagaactttacatttgtgtcttccagatctggagaagaacagacatatttaaatcattcttgttgaacagtttttgtatgtacagtattatggtacttttttttttttagtatgagaactttttttgtatttgtacattgaactgctgtagttatacttttatattaaaggggaaaaagtccttataaataatgcctattaggctagtgctattactttgttcagcaaattctaccctggctttagagtttttaatagatgctacacctaataaaagtgcctctcatattgcaggaacgatttcagatgtgtaaggagactgaagaggagataccagtttttagtcttggaaagcaagttcacagtagaaggaggttgagatctttcttttatgtgagaaatctttgaatctcattcatgcgatcagagttgtagccaatttttgaaaaccttattttcaaaggaaataaatgattcactgtaggattcctttaaatatcaagcatcaccagtatatgctttgatggtatatgtatataacttaaagttctttcaaaagcctgatacagaaacgtgtccccagtttggtagcaatgtggaaaacctggctagagatgatatggagctgtccctcagaaagcaaagccatgcctggaatccctaataggctgcttagttgtgaacctgtttgatttgccttaagcctctatccagaaacctgcccgcttccgtctggttaagaagccagtggtggatattttctttgttaacattagaaatgcaaacattcccttgtcaaccaagaatactcaaagctacttgtattggaaatggcagaaggcctaaatccaaatttcttattttttataatttaccatagaagttttgtgattaaattcttacttctgccagtggaggtttatgcctgaaaggtcatggggtcctgtctgtaaatagacctaaagagaagtgcagtatttattctttgtaggcataatgtgtttgtcactgacaagcattcatgttcatcccactagtcttttattgcagtcttttattgtcattttcagccttatgttggagagctttgctttctcatcatgttcacattgtcttaagttttgtgagcttctgagaaagagcttggtaaaggtttaaaggggactttgttccaccagggagcattttatttgggcgtctcacccttttctaatgaaagctgttgtaagccacctctgacttggaaattctgaaagtatgaatattttttatatcttaattgtaaaatgccagttctccattatttagatgaatagtagaacactgcaccctttgtgcagtgtttttgtttctctactgcattcctacccccaccaaaaaaaagaaacttaaggaaatttttttttgagacagggtctccctctttcacccaggctggagtgcagcagcatgatctcagctcactgcagcctctgcctcccaggctcaagcaatcattccacctcagcctcttgattagctgggactacaggcatgtgccaccatactcggctaattctgttttaaaaattttttttgtagagatgaggtctcactatgttacccaggctggtctcgaacttttgggttcaagtgatcctcccgcctcagcctctcaaagtgttagtattataggtgtgagccaccatgcccagcctagaaaatttaaccttatcttttagccattcatttacttttatttgcttttttaaaaaaaaatctttaaattttagcctagagaagcacctcaggaactctaaacatcttaggcaaaaattaaactcaggtgagactgaaggagaaatttcagaaatacacatgtacctcatgggtaattaatagacatgcacagtttccttcaaatcaaatgtttaataaggaaattcatataattccaagaaaacaggcaaaatttggaatacataagcctagctaagataaagaactaccagttaattcttaacatcactggagcttccagcaggttttttaattgaaggacaaaaagtgtccatacatttgtgttatctcttcagagcctgagggagaagagagtggctttgcccagtggaaaggctggggatttgagaatgatacagggggaaggagtcaagcagaaatgccaggaagaaccaggcaaagacatttggcgccagaagcatccacttaatttctgtgaagagtgcccctggtgtttcatcttggcctgttttgatgagaatgttatcttttgtgtctggataacgcgtcagcttcttaaagtacatataaagatattctgtcacctccccacatgcacacacttttaaaatctatttttattctcttgctaaagttgtaattatgtcaagaattttccagctctaactgccttcttagtacatgtctttctgcctttgaagcatatgagtttgccaaagtcattctcccctaatgacatattgtggacttacattaagaaaatgggccaggcgcggtggctcacacctgtaatcccagcactttaggaggcccaggcgggtggattacctgaggtcaggagttcaagaccagactggtcaacatggtgaaactccatctctactaaaaatacagaaattagccaggagtgctgggtggacgcctgcaatcccagctacttgggaggttgaggcaggagaattgcttgaacccaggaggcagaggttgcagtgagctgagatcataccattgcactccagcctgcaagacagagtgaaactcttgtctcaaaaaaaaaaaaagaaaaaaagaaagtgagcctgttgatgtctagctaacccattggtggagtctgcattgaatctgtaagaatattgttctggatcatgcaggtgggatttgtataaaaagcctgtccaacatttagttctcactcgcatcagaatcatactgttttgaattgccatataagacatgctccatcatgacacttgcttctcctccaaatacaagttgagtgcttagtccttcacctgctagaatcaggatacaatcaacatgattatgttccttaacacacttggatttatgcagatgtggtgtgtcctttgctcttttttttcttaagacagagtcttgctcttgtcgctcaggctggagtgcagtggtgtgatttcggctcactgcaacctccgcctcctgggttcaagcgattctcctgcctcagcctcccgagtagctgggattacaggcaccaccaccataccaggctgattttttttgtatttttaatatagacagggcttcatcatgttggccaggctggcaggctggtctcgaactcctcacctcgtgatccgcccacctcagcttcccaaagtgctgtgattacaggcgtgagccaccgcgcctggcctgctcttaaaacccgttattcagaagatttgtaaaagaaataggctttttttttttttttggttaattcaaacgaggggaaaattagatagcattttcccctaaagaaatgttaatgttcattttgtggctttgttttcaagtttcaggagccatgtacatctcagaagtgttacgaagtgattagaaaaggcctctggtaaaagaccttcaaggaccaaccattattattggtcacttgtttgaacttggcgcttaaaaaaaaagttggactgtgatgctttggtgctctttatcacagacatcagtgatggtctgaaacactctctagcagtttatacgaagaatggacttacatgttatcagttacactcatgatttactcgttcagcttctacaagtccatactttatgctgtctcatttaagagacagtccacttctgaaaataaaatcgatagttgatgatacatttttggctagccagctttctgtaaaaggcaagtatgttagacatgcacagtttccttcaaatcaaatgtttaataaggtacttcaagaaacgcctttttaaaaatcaaaggttttggccaggcatggtggctcacgcctgtaatcccagcactttgggaggccaaggtgggcgaatcacaaggtcaggagtttgagaccagcctggccaacatggtgaaaccccgtctctactaaaaataccaaaaattagccgggcgtggtggtgggtacctgtaatcccagctactcaggaggctgagatgagaatcacttgatcccaggaggtagaggttgcagtgagccgagattgcgccattgcacttcagcctgggcaacgagtgaaactctcaaaaaaaaattcatagtaataataaagtccctgcatgcagtttggaaataaaatttaaactcatttatgtgtaataaatatgtaataattcacagtcaccatcaaatgttggaatcattgaattgcatacttgtactcattccggccacatcatgaagtgtttaaagatttgtatttgctgttgtccctatgtagttctattgatgtttggttttgttttttggggtttgttttgagcccaggctagagtgcaatggcacaatctcaactcactacagcctggacctccttggctcaagcagtcctcccacttcagcctcccaagtagctggtctgcaagtgctcaccaccacacctggctaatttttgtattttttgtagagacagagctctcactatgttgcctagactggtctcaaactcctgggcccaagcaatcctcccatcacagcctccgaaggtgctgggattacaggcataagccactgtgcccagcctgtttttaataatgatattaagtgggtttggttcatgtgttattaatcagtgttaataatcgtacttttttttttttttaaaagaaaccatggtattctaaaatcaggagtccaaataaaagaaagttctcggctgtgcatggtggctaacacctgtaatcccagcactttgggaggctgaggtgggtggatcactagaggtcaggagtttgaaacaagcctggccaacatggtaaaaccccctctctactaaaaatacaaaaattagccgggcatggtggtgcacacctgtaatcccagctactcgggatgttgaggcatgagatttccttgaacctggaaggcagaggttgctgtgagccgagatcgcgccactgcactccagcctgggtgacagagtaagactgtcgccaaaaaagaggaaaaaagttatccagtgcagtttctacagagataaaagaagtaatagttctggctgggtgtggtggcttatgcctgtaatcccaacactttgggaggccaaggcaggtggatcacatgaggtcaggagttcgagaccagcctggccaacatggcaaaactgtctctactaaaaatataaaaattaggtatggtggcacgtgcctgtacttacagctacttgggaggctgaggcatgagatgacaatctcttgaacccaggaggcggaggttgcagtgagctgagattgcaccactgcactccagcttgggtgatggagtgagactcaaataaaaaaggtactagttctgcatttcagagttggcttgttgaaccaggctatatgcttccaagatttaaatgtttttctgtattatactctcaattgtgttttaaaaaaatctcttacagaaatctctacctcaggcactaagtgttatgacatgggtagcatattgatattgaaaacttagctaggacttccagccttttaagataatttaaatgtaaaattaaatggttaaccagcaatctaatgtcatgtggtgtgcagtttggatattgcatgaacagctaaggaatcacctgttctagtgccaaagatcactcattgctaattttgttctgtacagcttatgtaatattttcatggtggagacggactctgtgtgctcagggccttgtctctaggaagattttgtcaattccaaatacagttttgaagattca

SEQ ID NO: 351 - DNA, 3924 bp, Homo sapiens
agtgatgaactcatgctctgttctgttttctcaaagctgaagtcggctaggtttgcaaagctgtgggctgagcactcaggcaatcacactctcagaaactgcggcggctctggactgcagcctcccaaggctccatgccagacaaagcatgcgtgtcacacttgctacaatagcctggatggtttcttttgtctccaattattcacacacagcaaatattttgccagatatcgaaaatgaagatttcatcaaagactgcgttcgaatccataacaagttccgatcagaggtgaaaccaacagccagtgatatgctatacatgacttgggacccagcactagcccaaattgcaaaagcatgggccagcaattgccagttttcacataatacacggctgaagccaccccacaagctgcacccaaacttcacttcactgggagagaacatctggactgggtctgtgcccattttttctgtgtcttccgccatcacaaactggtatgacgaaatccaggactatgacttcaagactcggatatgcaaaaaagtctgtggccactacactcaggttgtttgggcagatagttacaaagttggctgcgcagttcaattttgccctaaagtttctggctttgacgctctttccaatggagcacattttatatgcaactacggaccaggagggaattacccaacttggccatataagagaggagccacctgcagtgcctgccccaataatgacaagtgtttggacaatctctgtgttaaccgacagcgagaccaagtcaaacgttactactctgttgtatatccaggctggcccatatatccacgtaacagatacacttctctctttctcattgttaattcagtaattctaatactgtctgttataattaccattttggtacagcacaagtaccctaatttagttcttttggactaatacaattcaggaaagaaaaaacccaaaaaccaacctcattcacatatggctttttttttaaccaataacaattaggtgtacttctattttaaaacatttcagaaaaaaatatatgttatagcaatactcttactcaaaagaagaaatttcctaactctatcagataaactcatctttagtataaataagcattatttgcaggttgccacaggtggacttttagtaagtaacctaacccatgtttcagcttctaaatctgcaaaatgagcaaggtacagtagcacatttttaggtgattcttagtaactccagtagccttcattagttaaaaacattattattttttgcatgctgcttcgactctaaatatctggttttccctgtctttttggtttactacttccccagattcagaacagaggagtaactaggggatctgattttagaggccttaattttctgttcatggactgttaaaagtaaaaccaaactttcaaaagggataaacctaaatatttacttgttatcattagagagggaacatcaaatgctgggacatcattactaaccaatagcatcagacactggatttaatggataatcacaatggtcgtaatgtatacaaagacttatataccactttctcgtataaatttttcaaaaaatacaataataatataatttataaagaacactcttctatgaacaaccaccaccaccaaaaaaaaaaaaagccctcagaaaatttctcacaaataaggcaactaatgcctgatatctcaaaatcctttacaaaaggagatagttctagtcaaggagttttgggtatgttacttttttttcttctttttcttttcatctgcctccatcttaagtgcaatttcttcagctgtaagagctcccagtttcttattctttgctttcttaaccttttccttgatgctggccacatcaattttagtttcagtagaagctagacaaattaaaagcacaacacatgtaatactttagattttaccaagtaaaacaaagaatatatgtttaacaaagaatatatgtttaaggcagttaacttcagagtattcttataattgaataattgaaaggtgatcacagtataaaatataaaaacacttgcctaaagcagttagaaatttcttcagattaagataaaacaaatcataaaatactttatatattagtacaagtatacataaaaatggcataaatggcataattgaaccaattactggattcaactatattaagactatttccttaaatcctacttcagactaaattattttacctacattcttttccatattttggaacttctgagtcattattttccatcttgcacattaaaataatttaaaattacatgtatcccttctcaataagtttaatcagctaaccctaagctagaggtcaaaatctacttcctctaatatcaaaacgaaaatttaaagttttccaaatattaattcaatattaattgaatattcaatgaattaattcatttaatgttagattaattcattgaatattaattcaatgaatgactaattaatagtattttaacaagattttggtatatttaacaacattttggtaataaagacaataatttgagagtgtgtggaagtccccctaatagaagccaactatctaatcaatgccaaaagtgtgaacaaaatagagaaaggaagcagtgaaaaagaatgcaactttttcttaccattcaaagtacaggatcacagcataaaagaatcataagataaaacatcaaactacccagcaacctgagaagcacagagtgttaaagcctccaccgtgtggagaaactaaattagggtaactagctattgagtatattgagtaccttcaaagcactcaactgacaggttttacagactggaaattataatacttatgacatttctaccttttatataaccaataatctaccatagaatgtagtatttttaaagctattaacaagcaatatattaaaataataatgtattatatctgtttctgacccagtctatgtacaatattgctggtgagccctctcccttcagtgtgtcactgttcactttggagggttactttaggaagaggataagtgttaccacaggggaaaaaaatgcagaagaggatgcatcagaagaaatggcatgacaatgttttctcttagtgtcttttaaatactaggttagtgcgaaagtgatttctgccatttaaaaaccacaatcactttcgcactaatagctcctgaataagacctgtcagcatcctttagtctaaggtgatgagaaatccatgttaccgatatagaagccaaactctaagccaagatcacataaagagaagaaaaagtacaacttctgataattcctctttgagaggcatgacagcagagctcagggatcttcttgcatttctacagaagatgcactggctgccctgggtttgtatctttcacaacaaagagtcttttccaagcacagaccagaggtcaggagaggactgtcaatccagtttgcactgaaataggcattagctgcctctaaattataaattatctcagccatcccttgtccttaggattagtaattaatgaaatgctaagagaactgatgaaaagatacaactgtttcttaaaaagattcagacaaatttattatgggtttacttttcctaattaataaagacttttacatcatagaaagcattaccttccttaggtttcacaattggtttttccttaggtggaataaatgctttgtttctttcctcttgtctcttactgatggcttctgcttgtttagcctacattaataaataaaaaatatatcagttaaatgtatttatagttaaataattcaagtatctatgaactttgctattcatgtgagccagacataaagtgccgtacctttattgcttccaaaaaaaaaaaaaaaaaa

SEQ ID NO: 352 - DNA, 4542 bp, Homo sapiens
tgggggcgtcctccttcgtccccgcccggctgtcaagctgtgttctagcggccgagggaccgaggggggctaagaaagggggcgcccagccatgcagaggcaaaaaggcgctgcggaacggggtccccgtcgccagtgctgaggcaggaggtcggagccacaagtgaggggctgggaagcaggacccagcacgggcgtcttggcaggcggccgggcgcagggccaggctgctggggacgctcagggctttccacccaagccatgggcgctgtcgggcactcgggggtcccctcgtggctccggccactcggcgtgggcattacgttggcttcacatcgccatccagcctcgaagccaacaggactgaaaaatagcttcggccaaacgttctcctcccgctaaggagaggggtcgagtgcgtcagcccgaggggactggagagggatgccctagccctcgaggggcggaggacccgcggttgaaggaggcagcgggagcggagagcgccctccttgaccatcgaatgcctccttctgtgtttccattcctgtcgagtgggctgggccacgctgaccaccctggaggagggacggacgacgctcggcgggctctgaccgtgccgccttcttgtggctgctgactgggatccaggagggagtgggcatggggcgcagccgcgcctccctccctccccgcctcccgggcgccggggttggcgatgtggagacgtgaggggacccgtcggctgctccggcttctccaggactccgccaggcgcccgcgcgtccctcctcacccggaggaggagaggctccgcgcggggctccgaggcgggcggcgcgcggagccggagtcccagcctcgccatgggacataacgggagctggatctctccaaatgccagcgagccgcacaacgcgtccggcgccgaggctgcgggtgtgaaccgcagcgcgctcggggagttcggcgaggcgcagctgtaccgccagttcaccaccaccgtgcaggtcgtcatcttcataggctcgctgctcggaaacttcatggtgttatggtcaacttgccgcacaaccgtgttcaaatctgtcaccaacaggttcattaaaaacctggcctgctcggggatttgtgccagcctggtctgtgtgcccttcgacatcatcctcagcaccagtcctcactgttgctggtggatctacaccatgctcttctgcaaggtcgtcaaatttttgcacaaagtattctgctctgtgaccatcctcagcttccctgctattgctttggacaggtactactcagtcctctatccactggagaggaaaatatctgatgccaagtcccgtgaactggtgatgtacatctgggcccatgcagtggtggccagtgtccctgtgtttgcagtaaccaatgtggctgacatctatgccacgtccacctgcacggaagtctggagcaactccttgggccacctggtgtacgttctggtgtataacatcaccacggtcattgtgcctgtggtggtggtgttcctcttcttgatactgatccgacgggccctgagtgccagccagaagaagaaggtcatcatagcagcgctccggaccccacagaacaccatctctattccctatgcctcccagcgggaggccgagctgcacgccaccctgctctccatggtgatggtcttcatcttgtgtagcgtgccctatgccaccctggtcgtctaccagactgtgctcaatgtccctgacacttccgtcttcttgctgctcactgctgtttggctgcccaaagtctccctgctggcaaaccctgttctctttcttactgtgaacaaatctgtccgcaagtgcttgatagggaccctggtgcaactacaccaccggtacagtcgccgtaatgtggtcagtacagggagtggcatggctgaggccagcctggaacccagcatacgctcgggtagccagctcctggagatgttccacattgggcagcagcagatctttaagcccacagaggatgaggaagagagtgaggccaagtacattggctcagctgacttccaggccaaggagatatttagcacctgcctggagggagagcaggggccacagtttgcgccctctgccccacccctgagcacagtggactctgtatcccaggtggcaccggcagcccctgtggaacctgaaacattccctgataagtattccctgcagtttggctttgggccttttgagttgcctcctcagtggctctcagagacccgaaacagcaagaagcggctgcttccccccttgggcaacaccccagaagagctgatccagacaaaggtgcccaaggtaggcagggtggagcggaagatgagcagaaacaataaagtgagcatttttccaaaggtggattcctagcaaggattgtaaattcttggaagcaacggggagcttccatattcccaccagagtgtgggaatgctgtggccatgtgattgtatgatctccttgcaactcagtgtgagttgattcctccaatatgggccagatgcttttgaatgatagggaaatctacataaaatccagtgtcctctttattgagggagtatatgtatccatctcagtgatccatgtccttagtgaagtccacattattctctgtggggacaagagctgggcagttttgaatgggtcttgaggtgggtaccccatgtgcactttctgaggatgcctcacttccctgggctctgcagagaacacacagagagaagactttcagagctcacaggagcagggagcaggagcactctaagggaattccaagatcatgatggagcatggtggctccagagaaaatgcctgtttgatgaacttaaacatgtcaaacattttctgttgagaaggtagggatttggtgtcttacactgtttctctggaagccccagtcatatgactcactgtttctcctgatacccttcgtccctttcattgggatgtaggtaaggaatgacgattcctcacctatggtacacatggcgatagatgtgcccgggagtaagggagatattttgtccttgataattctgattttcccttggcatcaccaacgcctcagagagatacacctgcaccctccagtcagggtcagtgttggctggaaaacactgaaaagtcttcgctctgtctttcaccttaaattgtgttttctcaacaaatgagagagaagcttacgggggagatgcctgagagatgcctatggcgctgtagtttttttttcttccctatgatctcacatgaaaggtgctatgtaacaaccagtatgagtcaaatatattgaaaaaatcatcttatgcaaactttaggaattaaaaggtatttttaaaatggagagttagtgtaagctgggtcctttggaaacatcaaactgaaaaggcctgatttggaaaggtgactctgcccaaaaggttggcaagaatctgacaaagatggtttccttccgaggaagactccggaactcaggtgtggccagtctccttttcagtctgtttgtacagctgcggttctctcttaattttggacacagaggaggaacagaacagggagaaataatcattgtagagtgccaaggcaacatctgacccagatgagctcttcacttcctccttccctgtcgttgtagagccagactgggtagaagagggagggcagtgtcctcaactcatcagcctcacaagcaatttgggacccctctggggtggatttcaccaggttgaattagaaccgcagataatacttccctgttagtgaggacaaaccaagcgccagctctgcccttttctctagagtgttgtgttcttgctcttggtacttacaggagctagtctggtgccttgagcaagcttgaagggaagtgggtgtcctcaccagcaaacttccacatctcaactcgtgccctcttttggccacactggccccgtctcttggagggagcccagaccctgtagggagttttgttttcctttcttctcttgggtgtggtgtcttgtgtttctgaatgtgaacccaaagaccctacccctggagaggaagcaccttcctctttgtgttggtctcctcatagcactgtttgctcacagcagaaacggggctgccacagcctcctgcggctctgctgccttctgggccctgcgtgcatggcatctatagctccttgccctgatagtcaatgctgtggcccttcaagcttgtctttcaaagctttcacaatcattacaacttttatcaaggggaataataatctctaggaaaattatgtccactttaggagaatctgtcaagtgtagccactttggtgttgttctgataatatactgtatatgtacaacttaataaattttgatgaggcagaatctggttgggtatgtttcttatatatgtttgaagcagatggctgactactaacaggtcattgccaggtgtatttctatactctttgaagaataacattttaataaaaaattgaaaagcaaaaaaaaaaaaaaaaaaa

SEQ ID NO: 353 - DNA, 3815 bp, Homo sapiens
ttagtgagtggtgaaccaccaggggatcccgtctccccacaaaccagtatctctccgaggaggaggcgaaggagtgggaggaggcaacgagccgagagtcgagcttcgcgggcgcgcgcagcggctggagcgcgggggcgaggccgggccacctccccttcccggccgcgcactgcctggcccgcggcggttccaggcaccacccttcccgtccgggctgagcccgctgtggcagtgactagctcccgcggctagcggcactgtccaccgacgagcggcgccctcttctcccccttctccccacgatttccttctctgcggcggcacgccgtccagcagcctgcttcgccccgtcgtcaactttgagctggaggagaagcaactttggcagtggccgcggggttggaatcccgcttctcctcggcagcagtaggctcgcaagtcgctggggttaggtggggcaagagtttcgccggcgcatcagcgctgcttcggactgtttgcaacgtgtttccagcgagctgggagcggggttgtgactgcgagtcgtctgggggagggggacttgtttttcttttcctctagagacctcggcttgcaactggatcaaacgctgtcgaaaggatgtaaataggcagagcaactgttaccaagaaggccaccacccccacccaaaggcagtgaggagtgtggggcttcgtctgggctcccccgagtctcaacagtaatcaacagtcaggtgttgattgcaacttttcaaggtcagccaccgggagtagcctattccctctaggaaccttggagggcataccttgctgggactcaacttggctgagaaatgcacaagatgccaaaggaggaaggattatagggggcgtgtgtgtgacccccaagaccgatcttccgctatcaccctaatctccggttccccgctacccgggcgggggtgagtatgtgacatgtgcctaactctcagcagcaacttcggcagcaggtgtcgatcctaactaagcaggagctgcggctgccgggtgtgccctcaccaagccatgcgagccccgggcgcgcttctcgcccgcatgtcgcggctactgcttctgctactgctcaaggtgtctgcctcttctgccctcggggtcgcccctgcgtccagaaacgaaacttgtctgggggagagctgtgcacctacagtgatccagcgccgcggcagggacgcctggggaccgggaaattctgcaagagacgttctgcgagcccgagcacccagggaggagcagggggcagcgtttcttgcgggaccctcctgggacctgccggcggccccgggccgtgacccggctgcaggcagaggggcggaggcgtcggcagccggacccccgggacctccaaccaggccacctggcccctggaggtggaaaggtgctcggggtcaggagccttctgaaactttggggagagggaaccccacggccctccagctcttccttcagatctcagaggaggaagagaagggtcccagaggcgctggcatttccgggcgtagccaggagcagagtgtgaagacagtccccggagccagcgatcttttttactggccaaggagagccgggaaactccagggttcccaccacaagcccctgtccaagacggccaatggactggcggggcacgaagggtggacaattgcactcccgggccgggcgctggcccagaatggatccttgggtgaaggaatccatgagcctgggggtccccgccggggaaacagcacgaaccggcgtgtgagactgaagaaccccttctacccgctgacccaggagtcctatggagcctacgcggtcatgtgtctgtccgtggtgatcttcgggaccggcatcattggcaacctggcggtgatgtgcatcgtgtgccacaactactacatgcggagcatctccaactccctcttggccaacctggccttctgggactttctcatcatcttcttctgccttccgctggtcatcttccacgagctgaccaagaagtggctgctggaggacttctcctgcaagatcgtgccctatatagaggtcgcttctctgggagtcaccactttcaccttatgtgctctgtgcatagaccgcttccgtgctgccaccaacgtacagatgtactacgaaatgatcgaaaactgttcctcaacaactgccaaacttgctgttatatgggtgggagctctattgttagcacttccagaagttgttctccgccagctgagcaaggaggatttggggtttagtggccgagctccggcagaaaggtgcattattaagatctctcctgatttaccagacaccatctatgttctagccctcacctacgacagtgcgagactgtggtggtattttggctgttacttttgtttgcccacgcttttcaccatcacctgctctctagtgactgcgaggaaaatccgcaaagcagagaaagcctgtacccgagggaataaacggcagattcaactagagagtcagatgaactgtacagtagtggcactgaccattttatatggattttgcattattcctgaaaatatctgcaacattgttactgcctacatggctacaggggtttcacagcagacaatggacctccttaatatcatcagccagttccttttgttctttaagtcctgtgtcaccccagtcctccttttctgtctctgcaaacccttcagtcgggccttcatggagtgctgctgctgttgctgtgaggaatgcattcagaagtcttcaacggtgaccagtgatgacaatgacaacgagtacaccacggaactcgaactctcgcctttcagtaccatacgccgtgaaatgtccacttttgcttctgtcggaactcattgctgaaggacagtacttggttgggtcagatttatttgtttgattttcatatcccgtgaaagtttttaattcatatttttccttatagggaaaaatgcaaaaaagaaacaataaagaaagaaatattaactactgtagaactgattttacaaattaatatttgtgctttgaaaaaaagtttctatttagttatttaagaagaatgagaaggccaatagttttagattattttatctggtatggtgctaatattttatttgaaaaaagttactgcaacttaacttaaaattgctaacgttttttcttcttttaaaaatacaattattgtatattgattatagcaatgtgattttgtaggttattttatatttgagttgtgattgaaagtatgttgtatatggtattgtgagatgatttgtacttggaagcattcacaaagtagcaccaaataaattacactttattctttaatgtcattgtcaatctacttttaaccaatattcaataaatcttctaattgccttaaagatacaattactggttctatgcacaatttaaaaccggccttactgttttataacgtattttcttttaaggcaggtaatcattatgttataaagaagtttttctaatagcagtattttatatgcatgattcataaaactatgttgtatgttaaaacaaagctgtatttttaatattcaggtatagatgtcaaattacttctgaatacttataaaatatgaataaatagcagagtaggaagaaagtttcttttttaaaaaattcacctctgaactagcacatagagctacagattttcccttggggaattatgggcagaatcaagaattttaaaatgcagttgtcatctgatttcctctgaacactgacctttgaagctttgtgaatcctacgtaaagcactctg

SEQ ID NO: 354 - DNA, 1551 bp, Homo sapiens
gtcaaccgcccaacggctgaggagtgcggcagcgcgccagagactggcgggcagctccgcccgcggccgggatgcactaggcaaagccagctgggctcctgagtccggtgggtacttggagaacttactacgtctagctggaggattgtaaatgcaccaatcagcatgctgtgtctagctcaagaactcaagctccatgaggagatgtttcattgtcgagagcagtcatgatggcctgcactccacacaatgcaacagagtgaaagagcaggttctgcttctttggtgtagtcctgaagcttcctaagaaacttcacatcaggtgatggataggagcaaccctgtaaaaccagccttagactatttttcaaacaggctggtgaattaccagatctccgtcaagtgcagtaaccagttcaagttggaagtgtgtcttttgaatgcagaaaacaaagtcgtggacaaccaggctgggacccagggccagctgaaggtgctgggtgccaacctctggtggccgtacctgatgcacgaacaccccgcctacctgtactcgtgggaggatggtgattgctcacaccaaagccttggacccctcccagcctgtgacctttgtgaccaactccacctacgcagcagacaagggggctctgtatgtggatgtgatccgtgtgaacagctactactcttggtatcgcaactacgggcacctggagttgattcagctgcagctggccgcccagtttgagaattggtgtaagacatcacaatcccattattcagagcgcgtatggagtggaaacgcttgtagggcttcaccaggtaagcggtgttgaactttctgcttgtgtattctctctgggcagagatgccacttgcctcccccaccatgccatctctgaagaatattacagaccattttggagcatggtgaataagaaattttcaccttaggagttcagttgaatagtcatttttatatttgtgactgcaagtcactcttaggggctgtacttccttagtactggtagcattattatccaatggacttttatagctttcattaggttttcttttgtttttgttctttaaagaacgttttacttatcttagtatttcatttttcatctatattatgaggcagtaagagtcttctgtttttccaaagttgagactgctttatatttatttcgtattgtctacagctgtagtgttcaatacattagccactagccacatgtggttatttaaataagataaaataaaaattggccgggcgtggtggctcacgccggtaatcccagcactttgggaggccgaggcgggcagatcattaggtcaggagatcgagaccatccttactaagacggtgaacccccatctctattaaaaatacaaaaaattagccgggcgtggtggcgggcgcctgcagtcccagctactcaggaggctgaggcaggagaatggcgtgaacctgggaggcagagtttgcagtgagccgagatggcgccactgcactccagcctgggggacagagcgagactccatctc

SEQ ID NO: 355 - DNA, 4752 bp, Homo sapiens
atggaaagcggtgcagttctgctggaatccaaatcctccccatttaacctactgcatgagatgcatgagcttcgcctcctgggtcacctgtgtgacgtgacagtcagcgtggagtatcagggtgtccgcaaagacttcatggcccacaaggcagtgctggctgccaccagcaagttttttaaggaagtgttccttaatgagaagagtgtggatggtactaggactaatgtctacttaaatgaagtgcaggttgctgactttgcttcatttcttgagtttgtctacactgcaaaggtacaggtggaagaagatcgggtgcagcgaatgctggaagtggctgaaaagctgaaatgtttggatttatcagaaacttgttttcaattaaagaaacagatgttagagtcagtacttttggagttgcaaaatttctcagagtctcaggaggtggaggtgagcagtggctcccaagttagtgctgctcctgcccccagggcaagtgtggccaccgatggccctcaccccagtggtctcacggattccttggactacccaggagagagagccagcaatggcatgtcttcagatttgccaccgaagaagtccaaggacaaactagacaagaagaaagaggtagttaaacctccctaccctaaaatcaggagagctagtggaaggctggctgggaggaaggtctttgtggagatccctaaaaagaaatatacgagaagactccgagagcagcagaaaactgctgagggtgatgtgggggactacaggtgtccccaggaccaaagcccggacagggtgggcacggagatggagcaggtttccaaaaatgagggttgccaggcaggtgctgagttggaggaattgtcaaagaaagcagggccggaggaggaagaggaggaggaggaggaggacgaagaaggggagaagaagaagagcaactttaagtgcagcatttgcgagaaggcgtttctgtatgagaagagcttcctgaagcacagcaagcaccgccacggcgtggccaccgaggtggtgtaccgctgcgacacctgcggccagaccttcgccaaccgctgcaacctgaagagccaccagcgccacgtgcacagcagcgagcgccatttcccatgcgagctgtgcgggaagaagttcaagcgcaagaaggacgtgaagcggcacgtgctgcaggtgcatgagggcggcggcgagcggcaccgctgcggccagtgcggcaagggcctgagttccaagacagcgctgcggctgcacgagcgcacacacacgggagaccggccctacggctgcaccgagtgcggcgccaggttctcgcagccgtccgcgctcaagacgcacatgagaattcatacaggggaaaaaccttttgtctgtgatgaatgtggtgcaagattcactcagaaccacatgctgatttatcataaaaggtgtcacacaggtgaaagaccttttatgtgtgaaacatgtggcaagagttttgcttctaaggagtacttaaaacaccacaatagaatccatactggatccaaaccctttaaatgtgaagtatgtttcaggacttttgcccagcggaattcactgtaccagcatattaaagtccacacaggggagcgtccctactgctgtgaccagtgcggcaagcagttcacccagctcaacgccctccagcgccaccgccgcatccacacaggggagaggccattcatgtgcaatgcgtgcggacggacattcaccgacaagtccactcttcggcggcacacctcaatacacgataagaatactccatggaagtctttccttgtcattgtagatggctcgcccaagaacgatgacggacacaagactgaacagcctgacgaagagtatgtgtcatccaagctttcggataaattgctgtcttttgcagaaaatggccatttccacaacctggctgcagtccaagacactgtacctaccatgcaggagaacagttctgctgacacagcctgcaaggcagatgactccgtggtgtcccaggacaccctcctggccaccaccatcagtgagcttagcgagctgaccccacagacagactcgatgcccacacagcttcactctttgagcaacatggaataagagcttcaagcagttcccatcctgttagtctgcgtgtgtggtagctgaactcaagatgatgtggggctaagaaaaataattgtccatgtgcaaagatgtgggcaagaatggcctctgcagattttcctgaacttctgctaacttgcacggctttatcacagcatttttaaagctttccctcaaaaatcctgatctgcatgatctcagctactttattgacaaaaaggcagtgaacataacctcacttaattctggtgtagggtgtatgtgctaatcgttctaattcttgattacctagtttatagataactgctggtcttaattgcagagtacagagaactgaaccagctcctgatattgtagttagcagtcttcctggcttctcactctgccttatatttccatgtgggtttacttctctcataactactttcaaggtatttttcttccaagctgaaataaaactggggccacatattttcagtcatttcttccctgttgaattgaagcaaatcagattttctgtggggaccctcaaatgcaactgaagaaatagattgttgcattcattcctccccaccccccatttgtaggcagtaaacaaagtatgactgacagattgaacacctgcaaaactgctagcgtaatctcagcacatacgcagctaggaagtttgtcataaaatcaacttagaaatgagatgaggctgttcagtttgtcttaaaaaaatcagattaggtaaaagctgtcctaccaaagagtctagcaaaacaatatagtatttttttgcagaggcatgaaaaattaagacgctttagagtacttgaaagttgtgtagtcattttatttgcaaaatgaggtgactgtggcaaattatagaacacagagtattattacttttgccaggtttttctgacttgatttctgtaatttccagaaacccagacttctcatttccacacctagagatggaaacaggcaagtaactgacatgtctatttccttgggagcatgtgagaacatagcagtagggaccaaaagtctcagcacacttacctccgattatgccttaaagagttgattgtgaagaaccagtaactttgtcccaaatgcttctttggctgtttcatgcaggacttaattattgcttttaaaaattcacaatgaaaagacgattctgctgtatttgttaaacgttgacatttggttctagggccttgagtatgtgccacgtgcttgtgaaatgctatgattcacatgtaacatttaaacattaatttaaaaagggaaccttggagaattcttttgttcactagttccttttttctctacatttttaatttattaaacttgctgtgaaaacactttgattttctaagaggaaggtactttaagttccagaatgaacatgtagctgcactatgccagaaattaatgagggaagactttcttcctaagtgcttatgttttaacttatgttagtgaaaccactacaaggtgtttcaggcgctgataacatgcttcacacctgcccttggaggtcacagtactaatttacttcaaatttagttatgacagtgtcactgtatcctagttatgtttacagcacaaataaataatgactgtcatacatccagaggagaccgaacctgcccagctgatgtactgttttatggaataaagtcacttgatcagaaggaattgaaacaatagatcattttgttacctactggagggatttttgtcttgaatttgtttccttagaaattctacaaaaaaatgttgttaataaatgtctgctttgtaaaagcagttttgcaattttttaaagatctatttctgttataatttaggttctgcagaaatatgattcttaattgaaacatataatttgcttaattacgtgaataatgaaatgtaaaatccgggtccataagcctttatttcatacagtcctaggattaagctgtttaactgcttggatcccagttggtctctggcagtgggatcctggagaggagaaatcctggcctctgctcatgcgcaggccacaaccgggctggaagtgcggttgagctctctgccactttcttcaatgtaaaaagtaggcatcaaagatacgacttctactatatacatttctctgtccctgagaacagagaaacgtaaccctgtaggggactggttacagaggacctcctggagcatctgccccattcctccaagtccaagcacagccatgctgagtggaagcgaggccaccatctgagtggattggtcccaagtgtgtaatgaggaaagtggccaggtgccggcacagtgcctctcccagagcctcaagaagggccatttaggagcttgcttcaaccattttccaaccattttctgtgaaatgctgtcagcccaaactccaaagggatgtgcagcctttcgttttaccaaattctttgctgtcgtttggaaaaaatgggccatgtggtggagacctttatttaaggtgatttttacagaaatgtgattttgctgtaggtgattatccaaacaagtaaatttgagtgtataatttaatttttaacctgttaaataaaccttgtccctccaaggaaaaaaaaaaaa

SEQ ID NO: 356 - DNA, 2336 bp, Homo sapiens
ggaagaaacacagatggcggcggcgcagcgccattccgggccgggagcaggcagccagcagccctgtcctcaccgcggtccgcccgccgccgctaaatacccggatgcgccgcccaagcgccagacgcggagctgggaaaagggaggcagaggaggcggaggcagaggcagaggcagaggcagagcccgagcccggtgccgagaccaagcgacagaccggcggggctgggcctcgcaaagccggctcggcgagctctcccgacacccgagccggggaggaaaagcagcgactcctcgctcgcatccccgggagccgcactccagactggcccggtagtcaggggctcaggagcagatcccgaggcaggctttgctcagcctccgacgagggctggccctttggaaggcgccttcaacagccggaccagacaggccaccatgaccgagaattccacgtccgcccctgcggccaagcccaagcgggccaaggcctccaagaagtccacagaccaccccaagtattcagacatgatcgtggctgccatccaggccgagaagaaccgcgctggctcctcgcgccagtccattcagaagtatatcaagagccactacaaggtgggtgagaacgctgactcgcagatcaagttgtccatcaagcgcctggtcaccaccggtgtcctcaagcagaccaaaggggtgggggcctcggggtccttccggctagccaagagcgacgaacccaagaagtcagtggccttcaagaagaccaagaaggaaatcaagaaggtagccacgccaaagaaggcatccaagcccaagaaggctgcctccaaagccccaaccaagaaacccaaagccaccccggtcaagaaggccaagaagaagctggctgccacgcccaagaaagccaaaaaacccaagactgtcaaagccaagccggtcaaggcatccaagcccaaaaaggccaaaccagtgaaacccaaagcaaagtccagtgccaagagggccggcaagaagaagtgacaatgaagtcttttcttgcggacactccctcctgtctcctattttctgtaaataattttctccttttttctctcttgatgctcaccaccaccttttgcccccttctgttctgactttataagagacaggatttggattcttcagaaattacagaataattcatttttccttaaccagttgtgcaaggacagcaacaaccaatctaatgatgagaatgtacttatattttgttttgctattaacctacttacggggttagggatttgcggggggggcttgtgtgttttgttggcttgtttgccatgaaggtagatgtgggtggggagaagacacaaggcagtttgttctggctagatgagagggaacccaggaattgtgaggttagcaggaatatctttagggtgagtgagttttctttgagttgggcacccgttgtgagagtttcagaacctttggccagcaggagagaggtggtagggagcagccagccggcaaaggaaggagggggaaaaaaaccgccaccgggctgacttccacctcccagtggtgagcagtgggggcccaaacccagtttccttctcatttttgttagtttgcgctttcggcctccctattttcttagggaaggggagtggggtccaagtgacagctggatgggagaagccatagtttctcccagtcagctaggatgtagccattgggggatctttgtggcttcagcaaattctcttgttaaaccggagtgaaaacttcaggggaagggtggggagtcagccaagtgcctcagtgtgccctgttgaaacttaggtttttccacgcaatcgatggattgtgtcctaggaagacttttcttttcctctggatttttgttcctcctgtacaagaggtgtctttgcttggtttggtggggctgcggccacttaaaacctcccgatctctttttgagtcctttattataagtagttgtagctgcgggagggggagggggagtgggcgggcagtggatagtaagacttactgcagtcgatttgggatttgctaagtagttttacagagctagatctgtgtgcatgtgtgtgtttgtgtatatatacatatctagggctagtacttagtttcacacccgggagctgggagaaaaaacctgtacagttgtctttctcttatttttaataaaatagaaaaatcgcgcacttgcgcgtcccccccccacccccttttttaaacaagtgttacttgtgccgggaaaattttgctgtctttgtaattttaaaactttaaaataaattggaaaagggagaaactgaaaaaaa

SEQ ID NO: 357 - DNA, 1093 bp, Homo sapiens
cggccgcagtcgtcggccccatccgcgcgatgggctctgaggcggcgcagctgctggaggctgccgacttcgcggctcgcaagcaccggcagcagcggcggaaggaccccgaggggaccccctacatcaaccaccccatcggtgtggcacggatcctgacccacgaggcgggaatcactgacattgtggtgttacaggcggccctgctccatgacacggtggaggacacagacaccaccctggatgaggtggagctacactttggggcacaagtgcggcgcctggtggaggaggtaacagatgacaagactctgcccaagctggagagaaagaggctgcaggtggagcaagcgccccacagtagccccggggccaaactggtgaagctggcagacaagctgtacaatctgagggacctgaatcgctgcaccccagaggtaaaaatacaatagctgggccaaggggaagttttcaggacagctcattccatcaggaactcatggccttgaaccaagcttgccaggaagtggggaaaaggcagtgctttccttgacatcacgctagcaagtttctgtcgactcttatgcaggatggtcagaacatcgagtccaggaatacttcgagtgggcagcgcaggtggtgaaggggcttcagggaacaaaccggcaactggaagaggctctaaagcatctgttcaagcagcgggggctgacaatctgatcagtgcttgaagctatccagaggcacaactccagcctcgttcaggccggacaggattcatacgccatcttttctgtgtctcctgagctccctccatccttcccagatattagaggccaaaaaaagacttgcattttttctcagtctgaaggtctcctgctaactaagctgagccccgcgtggtgggaatcagatgtacccatccatttctgatgcactcaccgcctctccccaagtcttgggtctgtttgctattttgcatggtgggatctctggcccctcagggacttgagattatttaagtactagttcctaacacgttctggaaaataaaaataactctgggttaaggtttaaaaaaaaaaaaaaaaaa

SEQ ID NO: 358 - DNA, 495 bp, Homo sapiens
ggtagttcggattacttctttaagtctcttttctcttttttcgcgcaaaaatgccggatccagcgaaatccgctcctgctcccaagaagggctccaaaaaggctgttacgaaagtgcagaagaaggacggcaagaagcgcaagcgcagccgcaaggagagctactccgtttacgtgtacaaggtgctgaagcaggtccaccccgacaccggcatctcgtccaaggccatgggcatcatgaactccttcgtcaacgacatcttcgagcgcatcgcgggagaggcgtcccgcctggcgcactacaacaagcgctccaccatcacatcccgcgagatccagacggccgtgcgcctgctgctgcccggcgagctggccaagcacgccgtgtccgagggcaccaaggcggtcaccaagtacaccagctcgaagtaagagtgtgcaagggacgcaatagatcaaccacctaaccccaaaggctcttttcagagccacttca

SEQ ID NO: 359 - DNA, 4589 bp, Homo sapiens
ctcttattggtcgaaggctcgtccagctccgagcgtgcgtaaggtgagggctccttccgctccgcgactgcgttaactggagccaggctgagcgtcggcgccggggttcggtggcctctagtgagatctggaggatccaaggattctgtagctacaatgttgtcaagactttttcgaatgcatggcctctttgtggcctcccatccctgggaagtcatagtggggacagtgacactgaccatctgcatgatgtccatgaacatgtttactggtaacaataagatctgtggttggaattatgaatgtccaaagtttgaagaggatgttttgagcagtgacattataattctgacaataacacgatgcatagccatcctgtatatttacttccagttccagaatttacgtcaacttggatcaaaatatattttgggtattgctggccttttcacaattttctcaagttttgtattcagtacagttgtcattcacttcttagacaaagaattgacaggcttgaatgaagctttgccctttttcctacttttgattgacctttccagagcaagcacattagcaaagtttgccctcagttccaactcacaggatgaagtaagggaaaatattgctcgtggaatggcaattttaggtcctacgtttaccctcgatgctcttgttgaatgtcttgtgattggagttggtaccatgtcaggggtacgtcagcttgaaattatgtgctgctttggctgcatgtcagttcttgccaactacttcgtgttcatgactttcttcccagcttgtgtgtccttggtattagagctttctcgggaaagccgcgagggtcgtccaatttggcagctcagccattttgcccgagttttagaagaagaagaaaataagccgaatcctgtaactcagagggtcaagatgattatgtctctaggcttggttcttgttcatgctcacagtcgctggatagctgatccttctcctcaaaacagtacagcagatacttctaaggtttcattaggactggatgaaaatgtgtccaagagaattgaaccaagtgtttccctctggcagttttatctctctaaaatgatcagcatggatattgaacaagttattaccctaagtttagctctccttctggctgtcaagtacatcttctttgaacaaacagagacagaatctacactctcattaaaaaaccctatcacatctcctgtagtgacacaaaagaaagtcccagacaattgttgtagacgtgaacctatgctggtcagaaataaccagaaatgtgattcagtagaggaagagacagggataaaccgagaaagaaaagttgaggttataaaacccttagtggctgaaacagataccccaaacagagctacatttgtggttggtaactcctccttactcgatacttcatcagtactggtgacacaggaacctgaaattgaacttcccagggaacctcggcctaatgaagaatgtctacagatacttgggaatgcagagaaaggtgcaaaattccttagtgatgctgagatcatccagttagtcaatgctaagcatatcccagcctacaagttggaaactctgatggaaactcatgagcgtggtgtatctattcgccgacagttactttccaagaagctttcagaaccttcttctctccagtacctaccttacagggattataattactccttggtgatgggagcttgttgtgagaatgttattggatatatgcccatccctgttggagtggcaggacccctttgcttagatgaaaaagaatttcaggttccaatggcaacaacagaaggttgtcttgtggccagcaccaatagaggctgcagagcaataggtcttggtggaggtgccagcagccgagtccttgcagatgggatgactcgtggcccagttgtgcgtcttccacgtgcttgtgactctgcagaagtgaaagcctggctcgaaacatctgaagggttcgcagtgataaaggaggcatttgacagcactagcagatttgcacgtctacagaaacttcatacaagtatagctggacgcaacctttatatccgtttccagtccaggtcaggggatgccatggggatgaacatgatttcaaagggtacagagaaagcactttcaaaacttcacgagtatttccctgaaatgcagattctagccgttagtggtaactattgtactgacaagaaacctgctgctataaattggatagagggaagaggaaaatctgttgtttgtgaagctgtcattccagccaaggttgtcagagaagtattaaagactaccacagaggctatgattgaggtcaacattaacaagaatttagtgggctctgccatggctgggagcataggaggctacaacgcccatgcagcaaacattgtcaccgccatctacattgcctgtggacaggatgcagcacagaatgttggtagttcaaactgtattactttaatggaagcaagtggtcccacaaatgaagatttatatatcagctgcaccatgccatctatagagataggaacggtgggtggtgggaccaacctactacctcagcaagcctgtttgcagatgctaggtgttcaaggagcatgcaaagataatcctggggaaaatgcccggcagcttgcccgaattgtgtgtgggaccgtaatggctggggaattgtcacttatggcagcattggcagcaggacatcttgtcaaaagtcacatgattcacaacaggtcgaagatcaatttacaagacctccaaggagcttgcaccaagaagacagcctgaatagcccgacagttctgaactggaacatgggcattgggttctaaaggactaacataaaatctgtgaattaaaaaagctcaatgcattgtcttgtggaggatgaatagatgtgatcactgagacagccacttggtttttggctctttcagagaggtctcaggttctttccatgcagactcctcagatctgaacacagtttagtgctttacatgctgtgctctttgaagagatttcaacaagaatattgtatgttaaagcatcagagatggtaatctacagctcacctctgaaggcaaatataagctgggaaaaaagttttgatgaaattcttgaagttcatggtgatcagtgcaattgaccttctccctcactcctgccagttgaaaatggatttttaaattatactgtagctgatgaaactcctgattttgtagttaatttattaagtctgggatgtagaacttcaagaagtaagagctaagttctaagttcatgtttgtaaattaatacttcatttggtgctggtctattttgattttggggggtaatcagcattattcttcagaaggggacctgttttcttcaagggaagaaacactcttattcccaaactacagaataatgtgttaaacatgctaaatagttctatcaggaaaacaaatcactgtatttatctccgcaggctatttgttcagagaggccttttgtttaaatataaatgtttaaatataaatgtttgtctggattggctataacatgtctttcagcattaggcttttaagaaacacagggttttgtattctttactaaagatatcagagctcttaatgttgcttagatgagggtgactgtcaagtacaagcaagactgggaccttagaaatcattgtagaaacacagttttgaaagaaaaataccatgtctctaagccaactttaattgcttaaaagacatttttatttagttgaaaaatctagttttttttgtaaactgtatcaaatctgtatatgttgtaataaaacttatgctagtttattggaagtgttcaagaaataaaaatcaacttgtgtactgataaaatactctagcctgggccagagaagataatgttctttaatgttgtccaggaaaccctggcttgcttgccgagcctaatgaaagggaaagtcagctttcagagccagtgaaggagccacgtgaatggccctagaactgtgcctagttcctgtggccaggaggttggtgactgaaacattcacacagggctctttgatggacccacgaacgctcttagctttctcagggggtcagcagagttattgaatcttaattttttttaatgtacaagttttgtataaataataaagaactccttattttgtattacatctaatgcttcaagtgttgctcttggaaagctgatgatgtctcttgtagaagatggactctgaaaaacattccaggaaaccatggcagcatggagagcctcttagtgattgtgtctgcattgttattgtggaagatttaccttttctgttgtacgtaaagcttaaattgcttttgttgtgactttttagccagtgactttttctgagcttttcatggaagtggcagtgaaaaatatgttgagtgttcattttagtgactgtaattaatatcttgctggattaatgttttgtacaattactaaattgtatacattttgttatagaatacttttttctagtttcagtaaataatgaaaaggaagttaataccaaaaaaaaa

SEQ ID NO: 360 - DNA, 5450 bp, Homo sapiens
attggctgtgggagccaccgtcccgcctcccagcgactctcggcggtgccggagtcgggtgggttggcggctataaagctggtggcgaaggggaggcgccgcggactgtcctttcgtggctcactccctttcctctgctgccgctcggtcacgcttgtgcccgaaggaggaaacagtgacagacctggagactgcagttctctatccttcacacagctctttcaccatgcctggatcacttcctttgaatgcagaagcttgctggccaaaagatgtgggaattgttgcccttgagatctattttccttctcaatatgttgatcaagcagagttggaaaaatatgatggtgtagatgctggaaagtataccattggcttgggccaggccaagatgggcttctgcacagatagagaagatattaactctctttgcatgactgtggttcagaatcttatggagagaaataacctttcctatgattgcattgggcggctggaagttggaacagagacaatcatcgacaaatcaaagtctgtgaagactaatttgatgcagctgtttgaagagtctgggaatacagatatagaaggaatcgacacaactaatgcatgctatggaggcacagctgctgtcttcaatgctgttaactggattgagtccagctcttgggatggacggtatgccctggtagttgcaggagatattgctgtatatgccacaggaaatgctagacctacaggtggagttggagcagtagctctgctaattgggccaaatgctcctttaatttttgaacgagggcttcgtgggacacatatgcaacatgcctatgatttttacaagcctgatatgctatctgaatatcctatagtagatggaaaactctccatacagtgctacctcagtgcattagaccgctgctattctgtctactgcaaaaagatccatgcccagtggcagaaagagggaaatgataaagattttaccttgaatgattttggcttcatgatctttcactcaccatattgtaaactggttcagaaatctctagctcggatgttgctgaatgacttccttaatgaccagaatagagataaaaatagtatctatagtggcctggaagcctttggggatgttaaattagaagacacctactttgatagagatgtggagaaggcatttatgaaggctagctctgaactcttcagtcagaaaacaaaggcatctttacttgtatcaaatcaaaatggaaatatgtacacatcttcagtatatggttcccttgcatctgttctagcacagtactcacctcagcaattagcagggaagagaattggagtgttttcttatggttctggtttggctgccactctgtactctcttaaagtcacacaagatgctacaccggggtctgctcttgataaaataacagcaagtttatgtgatcttaaatcaaggcttgattcaagaactggtgtggcaccagatgtcttcgctgaaaacatgaagctcagagaggacacccatcatttggtcaactatattccccagggttcaatagattcactctttgaaggaacgtggtacttagttagggtggatgaaaagcacagaagaacttacgctcggcgtcccactccaaatgatgacactttggatgaaggagtaggacttgtgcattcaaacatagcaactgagcatattccaagccctgccaagaaagtaccaagactccctgccacagcagcagaacctgaagcagctgtcattagtaatggggaacattaagatactctgtgaggtgcaagacttcagggtggggtgggcatggggtgggggtatgggaacagttggaggaatgggatatctggggataattttaaaggattacatgttatgtaaatttttatgtgactgacatggagcctggatgactatcgtgtacttgggaaagtctctttgctctatttgctgacatgcttcctgttgtggtctggccaatgccaaatgtactcgaatgatgttaagggctctgtaaaacttcatacctctttggccatttgtatgcatgatgtttggtttttaaacatggtataatgaattgtgtacttctgtcagaagaaagcagaggtactaatctccaattaaaaaattttttaacatgtaagaattttgtactttgaacaacaagattacagaaagtacctgtggtttttggaaaacatttctagcttggggaatgtgacaacattccccagtgtggtaaaattggggtaaaatgtggtaaaatgtgatacgcacaaaccctttgaaaatagcaaaacaaacatgccctttttctaaaattgataaatcctaaagaggaagaaaagagctgggacaataaaacactggctctggaatctggaatgttaagtccaggccagcagtgacaaaagttattgtaatgacctctgaacagagaaacactgccattgaagaggcttctggtatagaaaacatggtacattcaggagctgtgaatatagctctaggtgtgctcctgaatcagttcatggtagattatgctgaacaacagtgagatgttattggaggtgtggatgagggagtttgttgttgcagtccttctttgcaccttattttaaagaataaatgaaacatttttctggttacttttttaaaaatttaaaatggaagggaagaataggggcagggcattattaggctatttctgatgcttcagtgttataaattcaacatagaggctgacaacctaaattcatggtgtaacacagctcttttccttttccttttttttttttttttggtatctgttcaatgaaaataaggtatgacccaagtttttacctagtctgactagaagtattccacttcaaggtctgaagtaggacttttaccttaaaaaacaacaacaaacaaaactatcacacaggatagataagaagattggttaaacagttttgtgtagatctttttggtgctgaactatgacatgagccttatagattgtaaaatagggatagttggaactaatgtacagaactaaattttttaaactttatttgctgttaaattctgtgaagtttcagttatctaaaataaatatacacaaatatgaaatataatgtttcagattgcaaggtaatatgtaatagtagtgtttgtaagatactcttgtctaatattaactagtagtattttgatttgtacagtcataatttgttaaaatgacttcatttaacattcactgatgtagattaataatgtaagttctgatttaaagaatggtggcaaaatggtgcatgtaatacttttgcaagtgttggggagatcggtatgttttgaaaagagtaatttaacttttgggtgccaggaaatgggttttctcaaagtccattgccggcaatgggcaggcctgcaaatactggcacagagcattaatcatacaccttattaacggtgaggtgaataactttgaaataaagttttagagaaatgtttcagatacttgagtattctttttcactcttgaactaacaacttcggcaagaaatcagctaatattctatttttaaatatgggcattaatttcatttcagttcgttcactcattccattcatttatcatttcacaaacatttgaaatcctaatataagcaaggtgctctgtttaaggcagaaatttgaaaatgtacaagatatatggtcttgtctttaaggagctgttcatctagaatggaggaatttacactgataattattcctacacttgaaacaaagaaattaactctcaaattgcgtggcaagcatatatagactttgctataaatatttatgaaatgagttactgttttccttaaaaaagctaagactaagggctggcaatcaaataagagcaaatttagtggtgaacgtagaactgcccactaccagctagagtctccaacctaaaagtcccatgttgctagtgatccccaggggttttatagaaggaatccctgcattggcagtaattttggattagatgatccctaagagcaccatcaagtcttaggattctatgaattaggaaataaaccaaattatatattttctaatactgatcagctcatattttatcatcatgtcatgtctggctttcatacttagtcataatttactttctgggtcatttagaggctagcgttctctaaggtcacttctgcttgcacattgtaggatattatttagtatggctttaagaattcaatctttccccctctcctttatggaatgtgtgtttcctctatttgtacacttaaccttttgtcctaagtttttatttttatggatactaatgagtaactttgaggttgacactagacccaaacagatgcaaacagccactttctgtcctcttgtgacacagttgaaacactttatctcttgtctgctgtttggagtgtcctgaaagaaacactgaagtggcagtcaacagagcaagggtaacaggatctttaaataatttaaagttgtctgatcttgacataaaagtgaaccctttctttaaaatttctagcaactgctcttaagtcataggttcctcattttttctttgctggtagtgggagaaaatagttgatctgtgatttttgttttcatctccccaaactatgttataaaggcagtaatttgatgctgaagattatgattagaaatcctcagatgggttatatattggggctttatcttttaatattaaaaagaatgtctttcctggactactttattcagtagtaagcactattcattctatgtatattccttattcagccttgcagactcctgtgggatctgatctcttcctgcttcaactcagtaccatactcaccaaggcttagtatgtcttcacccactctcccttctcttgcattcctcaaacatgctgagtttattccagccttaagcctttgatctacgcatcagaaatgttgggccccacttcagatcttctctgccctgccttctactccagtcactgctgtggtaactaattccatgaagtctttgaccaggttctcagagaatatgatagtacctctctttggattctagctgtatacctttcacttcagcctccctgacgtggaatgtctgcagaacttgtttggtactcccaattgcacagcccaaaggtgcaggggagttaggtgcccatggggccatccttgacctaggtggaaagttgctagtggataactgattactcttttcatcacctgggcagacagttctgaaatgcatttcgtaagtctcctcaaaagaggaggagacttctgtggcgggtttggcaataaccatccttatattggctttcctcttttgtttcactcctgtgcatctctcttgcatcctgggatcgcttctcaaataaatgactttcattcaa

SEQ ID NO: 361 - DNA, 3144 bp, Homo sapiens
attctttcttcgtgttcctgtgcgggattggtgtgcccaggggtttggctttccaattggctaacgccggggtgggtggggaatgtggggagatttgaatttgaaaccggtagggagtgataatccgcattcagttgtcgaggagtgccagtcaccttcagtttctggagctggccgtcaacatgtcctttcctaaggcgcccttgaaacgattcaatgacccttctggttgtgcaccatctccaggtgcttatgatgttaaaactttagaagtattgaaaggaccagtatcctttcagaaatcacaaagatttaaacaacaaaaagaatctaaacaaaatcttaatgttgacaaagatactaccttgcctgcttcagctagaaaagttaagtcttcggaatcaaagaaggaatctcaaaagaatgataaagatttgaagatattagagaaagagattcgtgttcttctacaggaacgtggtgcccaggacaggcggatccaggatctggaaactgagttggaaaagatggaagcaaggctaaatgctgcactaagggaaaaaacatctctctctgcaaataatgctacactggaaaaacaacttattgaattgaccaggactaatgaactactaaaatctaagttttctgaaaatggtaaccagaagaatttgagaattctaagcttggagttgatgaaacttagaaacaaaagagaaacaaagatgaggggtatgatggctaagcaagaaggcatggagatgaagctgcaggtcacccaaaggagtctcgaagagtctcaagggaaaatagcccaactggagggaaaacttgtttcaatagagaaagaaaagattgatgaaaaatctgaaacagaaaaactcttggaatacatcgaagaaattagttgtgcttcagatcaagtggaaaaatacaagctagatattgcccagttagaagaaaatttgaaagagaagaatgatgaaattttaagccttaagcagtctcttgaggagaatattgttatattatctaaacaagtagaagatctaaatgtgaaatgtcagctgcttgaaaaagaaaaagaagaccatgtcaacaggaatagagaacacaacgaaaatctaaatgcagagatgcaaaacttaaaacagaagtttattcttgaacaacaggaacgtgaaaagcttcaacaaaaagaattacaaattgattcacttctgcaacaagagaaagaattatcttcgagtcttcatcagaagctctgttcttttcaagaggaaatggttaaagagaagaatctgtttgaggaagaattaaagcaaacactggatgagcttgataaattacagcaaaaggaggaacaagctgaaaggctggtcaagcaattggaagaggaagcaaaatctagagctgaagaattaaaactcctagaagaaaagctgaaagggaaggaggctgaactggagaaaagtagtgctgctcatacccaggccaccctgcttttgcaggaaaagtatgacagtatggtgcaaagccttgaagatgttactgctcaatttgaaagctataaagcgttaacagccagtgagatagaagatcttaagctggagaactcatcattacaggaaaaagcggccaaggctgggaaaaatgcagaggatgttcagcatcagattttggcaactgagagctcaaatcaagaatatgtaaggatgcttctagatctgcagaccaagtcagcactaaaggaaacagaaattaaagaaatcacagtttcttttcttcaaaaaataactgatttgcagaaccaactcaagcaacaggaggaagactttagaaaacagctggaagatgaagaaggaagaaaagctgaaaaagaaaatacaacagcagaattaactgaagaaattaacaagtggcgtctcctctatgaagaactatataataaaacaaaaccttttcagctacaactagatgcttttgaagtagaaaaacaggcattgttgaatgaacatggtgcagctcaggaacagctaaataaaataagagattcatatgctaaattattgggtcatcagaatttgaaacaaaaaatcaagcatgttgtgaagttgaaagatgaaaatagccaactcaaatcggaagtatcaaaactccgctgtcagcttgctaaaaaaaaacaaagtgagacaaaacttcaagaggaattgaataaagttctaggtatcaaacactttgatccttcaaaggcttttcatcatgaaagtaaagaaaattttgccctgaagaccccattaaaagaaggcaatacaaactgttaccgagctcctatggagtgtcaagaatcatggaagtaaacatctgagaaacctgttgaagattatttcattcgtcttgttgttattgatgttgctgttattatatttgacatgggtattttataatgttgtatttaattttaactgccaatccttaaatatgtgaaaggaacattttttaccaaagtgtcttttgacattttattttttcttgcaaatacctcctccctaatgctcacctttatcacctcattctgaaccctttcgctggctttccagcttagaatgcatctcatcaacttaaaagtcagtatcatattattatcctcctgttctgaaaccttagtttcaagagtctaaaccccagattcttcagcttgatcctggaggtcttttctagtctgagcttctttagctaggctaaaacaccttggcttgttattgcctctactttgattctgataatgctcacttggtcctacctattatccttctacttgtccagttcaaataagaaataaggacaagcctaacttcatagaaacctctctatttttaatcagttgtttaataatttacaggttcttaggctccatcctgtttgtatgaaattataatctgtggattggcctttaagcctgcattcttaacaaactcttcagttaattcttagatacactaaaaatctgagaaactctacatgtaactatttcttcagagtttgtcatatactgcttgtcatctgcatgtctactcagcatttgattaacatttgtgtaatatgaaataaaattacacagtaagtcatttaaccaattaaaaa

SEQ ID NO: 362 - DNA, 3966 bp, Homo sapiens
gcgccccgcgcccgggccccggcgatggtgacacatgcggcggcggcgcgccggcggcaggaccatggttgagcgcgccagcaagttcgtgctggtggtggcgggctcggtgtgcttcatgctcatcttgtaccagtacgcgggcccaggactgagcctgggcgcgcccggcggccgcgcgccgcccgacgacctggacctgttccccacacccgacccccactacgagaagaagtactacttcccggtccgcgagctggagcgctcgctgcgcttcgacatgaagggcgacgacgtgatcgtcttcctgcacatccagaagacgggcggcaccaccttcggccgccacctcgtgcagaacgtacgcctcgaggtgccgtgcgactgccggcccggccagaagaagtgcacctgctaccggcccaaccgccgcgagacttggctcttctcccgcttctccaccggctggagctgcgggctgcacgccgactggaccgagctcaccaactgcgtgcccggcgtgctggaccgccgcgactccgccgcgctgcgcacgcccaggaagttctactacatcaccctgctacgagaccccgtgtcccgctacctgagcgagtggcggcatgtgcagaggggtgccacgtggaagacgtcgttgcatatgtgtgatgggcgcacgcccacgcctgaggagctgccgccctgctacgagggcacggactggtcgggctgcacgctacaggagttcatggactgcccgtacaacctggccaacaaccgccaggtgcgcatgctggccgacctgagcctggtgggctgctacaacctgtccttcatccccgagggcaagcgggcccagctgctgctcgagagcgccaagaagaacctgcggggcatggccttcttcggcctgaccgagttccagcgcaagacgcagtacctgttcgagcggacgttcaacctcaagttcatccggcccttcatgcagtacaatagcacgcgggcgggcggcgtggaggtggatgaagacaccatccggcgcatcgaggagctcaacgacctggacatgcagctgtacgactacgccaaggacctcttccagcagcgctaccagtacaagcggcagctggagcgcagggagcagcgcctgaggagccgcgaggagcgtctgctgcaccgggccaaggaggcactgccgcgggaggatgccgacgagccgggccgcgtgcccaccgaggactacatgagccacatcattgagaagtggtagtggcggtggtggccacggggaggcctcttggggggtgtgggggataaaacaggacagacgacaggtccacccaagactgtcaagggatgagcatcccaaacctgctccacagaggtagctgcgtcctgaaaaaaaacagagcagggatgtagtggggctgggcagggatgggggcttgagaaatcaacaggtgcagcccagtgggtcagaggaaagcgtgctcgaaggatgccatggtcagggcagggcctccagagcaggtgttgtgcctggagctgctctcctggcctccttggatttatcgcaaaaactgaaggtttgcgcaagagacgaggacagcggaaagtggacctgccaggccgggagtgtgtccctcaccaactatgcacacagcactcgctcttagctcctctgtccgggctactaggagtgagaccagcttctggcaactgccccagctccaggccatcccatagcccctcctcttctggctgcccccaatgccccgaggcctggggagcccccagctcacccatctgtagctccctcaaagtcagggcccaccccatctgaggcagagaagactcgagtccagcccccaggaagcctgctcccctctctggcccatggtcctgcttcatgctttgggtcaggaggccaaagctgatgttcaggccccacccactccctacagtcctcagaccaaggaggggtttgggtagtaggcccgagctgcattgccggccttcctcgggccaactggcagcccaggagtggggaggctttggccagggatgctgccacttgtgcgtgagtccgcggctggcccttggaggtgaccatccaggcaggcctggctcagactggaagggctggggaccgagggctcccctgcctctgttctcctttctgacccactgggatttgctagcaggctgccccagccccatcaccgaaacacatactcaagagctcaaataccactgctcccaccagcgtacggattaagttcatcaggcttccatcggctggagcatgggaccatagcccctgcccaggagccgtaccctcggaccacagtggctctgtatggccaggaactgggactcgagctttcagattctcaactagccttggcaaaacagctgtaggtggcctccctgacaacagacactcagccctccccaccctggctctccttgcatttccccatgctccccaccccctggcaaaaggctggccatgctctgttcccagcagccgcgcaggtttccccactggctgcaatggccctaccaaaagccatgttgcatatccgttgtaagcacgtgccctgtgccctgtccccattccttatgccctaggaggccaagctggtgtctctaggagggcccacacaggcaccctggatcccccagagagtagattggtgtgctcaggccgcaggctgactcagaggtagggcagtgggctctgcaggccacctggctggggttggtgggggtcctctctcctgccccagcttccactcagccaccacagttgccacaccatggggtggagacgtgggtcaccacgggcttgggagcaagcgccttctgcagcacaggaagccgaagctggggtcaggtgaggtcgctacccctggaggtctggcataagggccccaccctcaggtctcctacactggccccattttactttggggtccaaggacaggatggtcaacagggcagggtggacagcgtgccagcgccgcgcagggccacctccctgggtggatgcatcacactaaggaagtgagtgccaaggggatttagtggtgtggttctttcaaagggaggtcagggtcaatgggaatctgctcggacactcaacatgggggtgggtgcactccttggaggaggaggaacacgttcaggggattgtgaggtcttgcacaagccacgtggggcaccttggcttcccggcaggaggtggacacccagccagaggcctggctcaaggtgacctcaccttcaccatgggcttcctgggtgcgcgggcctgagcgcaggttgttttgtacatattggaatatgtgttaacttatgccccgcatcccaactcacacggaagcacgggtcttgtctcagtctcttcgctgcatttggaaagcagtctcctctcgggccagcgccgggctgaggtgtccagaggcggcggcagctggcagtgccctcagcccccaagtgtccagcctggcacttcccattcaggccacctgctttgggtcaacagttcctttgccagcagcatctcctaaattgtaaggactctgtccaccggggccctcccagggctgtgaggacggaaacaggcagggagtggagctaacagcttagtcaccaggacccccagacctgcaaacgtcccctcctggaaggggaagccaggaacagcagaactgcccacaaaacaaggctgtgaacttttcgggaactggaactgtttaacttgaacccaggattgtttaaagctttatttatttatagcttcttcttaaaaaaaagtgttgaagaaattttttggttattcatacaaaaaaatgagttgatgatggaaaagcaagtcataatcatctaattgtttttgtctaggtcgagaatgaatgttagctgatgaaataaaccctgacaaggaaaaaaaaaaaaaaa

SEQ ID NO: 363 - DNA, 1418 bp, Homo sapiens
gcggcccgaaatcgtaggacttccgaaagcagcggcggcgtttgcttcactgcttggaagtgtgagtgcgcgaagatgcgaaaggtggttttgattaccggggctagcagtggcattggcctggccctctgcaagcggctgctggcggaagatgatgagcttcatctgtgtttggcgtgcaggaatatgagcaaggcagaagctgtctgtgctgctctgctggcctctcaccccactgctgaggtcaccattgtccaggtggatgtcagcaacctgcagtcattcttccgggcctccaaggaacttaagcaaagttgcaggtttcagagattagaccgtatatatctaaatgctgggatcatgcctaatccacaactaaatatcaaagcacttctctttggcctcttttcaagaaaagtgattcatatgttctccacagctgaaggcctgctgacccagggtgataagatcactgctgatggacttcaggaggtgtttgagaccgatgtctttggccattttatcctgattcgggaactggagcctctcctctgtcacagtgacaatccatctcagctcatctggacatcatctcgcaatgcaaggaaatctaatttcagcctcgaggacttccagcacagcaaaggcaaggaaccctacagctcttccaaatatgccactgaccttttgagtgtggctttgaacaggaactttcaaccagcagcttcgcttttttgcaaatgcattcactttgacaccatataatggaacagaagctctggtatggcttttccaccaaaagcctgaatctgtcaatcctctgatcaaatatctgagtgccaccactggctttggaagaaattacattatgacccagaagatggacctagatgaagacactgctgaaaaattttatcaaaagttactggaactggaaaagcacattagggtcactattcaaaaaacagataatcaggccaggctcagtggctcatgcctataattccagcactttgggaggccaaggcagaaggatcacttgagaccaggagttcgagaccagcctgagaaacatagtgagcccttgtctctacaaaaagaaataaaaataatagctgggtgtggtggcatgcgcatgtagtcccaactactcaggaggatgaggtggggggatctcttgaggctgggaggcggaggttgcagtgagctgagattgtgccactgcactccagcctgggtgacagcgagaccctgtctcaaaacatatatatatttaatatatatgtaaagccagagctgacaatgacactctggaacattgcataccttctgtacattctggggtacatggatttctactgagttggataatatgcatttgtaataaactatgaactatgaaaaaaaaaaaaaaaaaa

SEQ ID NO: 364 - DNA, 1254 bp, Homo sapiens
ctcacttggccttacactccgctcggctcaccatgtgtcactctcgcagctgccacccgaccatgaccatcctgcaggccccgaccccggccccctccaccatcccgggaccccggcggggctccggtcctgagatcttcaccttcgaccctctcccggagcccgcagcggcccctgccgggcgccccagcgcctctcgcgggcaccgaaagcgcagccgcagggttctctaccctcgagtggtccggcgccagctgccagtcgaggaaccgaacccagccaaaaggcttctctttctgctgctcaccatcgtcttctgccagatcctgatggctgaagagggtgtgccggcgcccctgcctccagaggacgcccctaacgccgcatccctggcgcccacccctgtgtccgccgtcctcgagccctttaatctgacttcggagccctcggactacgctctggacctcagcactttcctccagcaacacccggccgccttctaactgtgactccccgcactccccaaaaagaatccgaaaaaccacaaagaaacaccaggcgtacctggtgcgcgagagcgtatccccaactgggacttccgaggcaacttgaactcagaacactacagcggagacgccacccggtgcttgaggcgggaccgaggcgcacagagaccgaggcgcatagagaccgaggcacagcccagctggggctaggcccggtgggaaggagagcgtcgttaatttatttcttattgctcctaattaatatttatatgtatttatgtacgtcctcctaggtgatggagatgtgtacgtaatatttattttaacttatgcaagggtgtgagatgttccccctgctgtaaatgcaggtctcttggtatttattgagctttgtgggactggtggaagcaggacacctggaactgcggcaaagtaggagaagaaatggggaggactcgggtgggggaggacgtcccggctgggatgaagtctggtggtgggtcgtaagtttaggaggtgactgcatcctccagcatctcaactccgtctgtctactgtgtgagacttcggcggaccattaggaatgagatccgtgagatccttccatcttcttgaagtcgcctttagggtggctgcgaggtagagggttgggggttggtgggctgtcacggagcgactgtcgagatcgcctagtatgttctgtgaacacaaataaaattgatttactgtctgcaaaaaaaaaaaaaaa

SEQ ID NO: 365 - DNA, 3676 bp, Homo sapiens
gagagacgagggcagcggaggaggcgaggagcgccgggtaccgggccgggggagccgcgggctctcggggaagagacggatgatgaacaagctttacatcgggaacctgagccccgccgtcaccgccgacgacctccggcagctctttggggacaggaagctgcccctggcgggacaggtcctgctgaagtccggctacgccttcgtggactaccccgaccagaactgggccatccgcgccatcgagaccctctcgggtaaagtggaattgcatgggaaaatcatggaagttgattactcagtctctaaaaagctaaggagcaggaaaattcagattcgaaacatccctcctcacctgcagtgggaggtgttggatggacttttggctcaatatgggacagtggagaatgtggaacaagtcaacacagacacagaaaccgccgttgtcaacgtcacatatgcaacaagagaagaagcaaaaatagccatggagaagctaagcgggcatcagtttgagaactactccttcaagatttcctacatcccggatgaagaggtgagctccccttcgccccctcagcgagcccagcgtggggaccactcttcccgggagcaaggccacgcccctgggggcacttctcaggccagacagattgatttcccgctgcggatcctggtccccacccagtttgttggtgccatcatcggaaaggagggcttgaccataaagaacatcactaagcagacccagtcccgggtagatatccatagaaaagagaactctggagctgcagagaagcctgtcaccatccatgccaccccagaggggacttctgaagcatgccgcatgattcttgaaatcatgcagaaagaggcagatgagaccaaactagccgaagagattcctctgaaaatcttggcacacaatggcttggttggaagactgattggaaaagaaggcagaaatttgaagaaaattgaacatgaaacagggaccaagataacaatctcatctttgcaggatttgagcatatacaacccggaaagaaccatcactgtgaagggcacagttgaggcctgtgccagtgctgagatagagattatgaagaagctgcgtgaggcctttgaaaatgatatgctggctgttaaccaacaagccaatctgatcccagggttgaacctcagcgcacttggcatcttttcaacaggactgtccgtgctatctccaccagcagggccccgcggagctccccccgctgccccctaccaccccttcactacccactccggatacttctccagcctgtacccccatcaccagtttggcccgttcccgcatcatcactcttatccagagcaggagattgtgaatctcttcatcccaacccaggctgtgggcgccatcatcgggaagaagggggcacacatcaaacagctggcgagattcgccggagcctctatcaagattgcccctgcggaaggcccagacgtcagcgaaaggatggtcatcatcaccgggccaccggaagcccagttcaaggcccagggacggatctttgggaaactgaaagaggaaaacttctttaaccccaaagaagaagtgaagctggaagcgcatatcagagtgccctcttccacagctggccgggtgattggcaaaggtggcaagaccgtgaacgaactgcagaacttaaccagtgcagaagtcatcgtgcctcgtgaccaaacgccagatgaaaatgaggaagtgatcgtcagaattatcgggcacttctttgctagccagactgcacagcgcaagatcagggaaattgtacaacaggtgaagcagcaggagcagaaataccctcagggagtcgcctcacagcgcagcaagtgaggctcccacaggcaccagcaaaacaacggatgaatgtagcccttccaacacctgacagaatgagaccaaacgcagccagccagatcgggagcaaaccaaagaccatctgaggaatgagaagtctgcggaggcggccagggactctgccgaggccctgagaaccccaggggccgaggaggggcggggaaggtcagccaggtttgccagaaccaccgagccccgcctcccgccccccagggcttctgcaggcttcagccatccacttcaccatccactcggatctctcctgaactcccacgacgctatcccttttagttgaactaacataggtgaacgtgttcaaagccaagcaaaatgcacaccctttttctgtggcaaatcgtctctgtacatgtgtgtacatattagaaagggaagatgttaagatatgtggcctgtgggttacacagggtgcctgcagcggtaatatattttagaaataatatatcaaataactcaactaactccaatttttaatcaattattaatttttttttctttttaaagagaaagcaggcttttctagactttaaagaataaagtctttgggaggtctcacggtgtagagaggagctttgaggccacccgcacaaaattcacccagagggaaatctcgtcggaaggacactcacggcagttctggatcacctgtgtatgtcaacagaagggataccgtctccttgaagaggaaactctgtcactcctcatgcctgtctagctcatacacccatttctctttgcttcacaggttttaaactggttttttgcatactgctatataattctctgtctctctctgtttatctctcccctccctcccctccccttcttctccatctccattcttttgaatttcctcatccctccatctcaatcccgtatctacgcacccccccccccccaggcaaagcagtgctctgagtatcacatcacacaaaaggaacaaaagcgaaacacacaaaccagcctcaacttacacttggttactcaaaagaacaagagtcaatggtacttgtcctagcgttttggaagaggaaaacaggaacccaccaaaccaaccaatcaaccaaacaaagaaaaaattccacaatgaaagaatgtattttgtctttttgcattttggtgtataagccatcaatattcagcaaaatgattcctttctttaaaaaaaaaaaatgtggaggaaagtagaaatttaccaaggttgttggcccagggcgttaaattcacagatttttttaacgagaaaaacacacagaagaagctacctcaggtgtttttacctcagcaccttgctcttgtgtttcccttagagattttgtaaagctgatagttggagcatttttttatttttttaataaaaatgagttggaaaaaaaataagatatcaactgccagcctggagaaggtgacagtccaagtgtgcaacagctgttctgaattgtcttccgctagccaagaacctatatggccttcttttggacaaaccttgaaaatgtttatttaaaaaaaaaaaagatgacaaagaaaaacagagagagagaatattggagatgtcctgaattttaatagggtacgcgccattagggctttttgcgctaaaggatgaacatgtactggtttatgtggacaagccattataccaccagactgcaatgccagtttcctctactgcaaacagtgttctgtgacaaaaaaaaaaaaaaaaaaaagaaaaaaaaagaaaaaacagaaatatatccagctaacaagaaaaaa

SEQ ID NO: 366 - DNA, 1201 bp, Homo sapiens
aatattagagtctcaacccccaataaatataggactggagatgtctgaggctcattctgccctcgagcccaccgggaacgaaagagaagctctatctcccctccaggagcccagctatgaactccttctccacaagcgccttcggtccagttgccttctccctggggctgctcctggtgttgcctgctgccttccctgccccagtacccccaggagaagattccaaagatgtagccgccccacacagacagccactcacctcttcagaacgaattgacaaacaaattcggtacatcctcgacggcatctcagccctgagaaaggagacatgtaacaagagtaacatgtgtgaaagcagcaaagaggcactggcagaaaacaacctgaaccttccaaagatggctgaaaaagatggatgcttccaatctggattcaatgaggagacttgcctggtgaaaatcatcactggtcttttggagtttgaggtatacctagagtacctccagaacagatttgagagtagtgaggaacaagccagagctgtgcagatgagtacaaaagtcctgatccagttcctgcagaaaaaggcaaagaatctagatgcaataaccacccctgacccaaccacaaatgccagcctgctgacgaagctgcaggcacagaaccagtggctgcaggacatgacaactcatctcattctgcgcagctttaaggagttcctgcagtccagcctgagggctcttcggcaaatgtagcatgggcacctcagattgttgttgttaatgggcattccttcttctggtcagaaacctgtccactgggcacagaacttatgttgttctctatggagaactaaaagtatgagcgttaggacactattttaattatttttaatttattaatatttaaatatgtgaagctgagttaatttatgtaagtcatatttatatttttaagaagtaccacttgaaacattttatgtattagttttgaaataataatggaaagtggctatgcagtttgaatatcctttgtttcagagccagatcatttcttggaaagtgtaggcttacctcaaataaatggctaacttatacatatttttaaagaaatatttatattgtatttatataatgtataaatggtttttataccaataaatggcattttaaaaaattcagcaaaaaaaaaaaaaaaaaaa

SEQ ID NO: 367 - DNA, 4617 bp, Homo sapiens
atctaagcttctctgtcttcctccctccctcccttcctcttactctcattcatttcatacacactggctcacacatctactctctctctctatctctctcagaatgacaattctaggtacaacttttggcatggttttttctttacttcaagtcgtttctggagaaagtggctatgctcaaaatggagacttggaagatgcagaactggatgactactcattctcatgctatagccagttggaagtgaatggatcgcagcactcactgacctgtgcttttgaggacccagatgtcaacatcaccaatctggaatttgaaatatgtggggccctcgtggaggtaaagtgcctgaatttcaggaaactacaagagatatatttcatcgagacaaagaaattcttactgattggaaagagcaatatatgtgtgaaggttggagaaaagagtctaacctgcaaaaaaatagacctaaccactatagttaaacctgaggctccttttgacctgagtgtcgtctatcgggaaggagccaatgactttgtggtgacatttaatacatcacacttgcaaaagaagtatgtaaaagttttaatgcacgatgtagcttaccgccaggaaaaggatgaaaacaaatggacgcatgtgaatttatccagcacaaagctgacactcctgcagagaaagctccaaccggcagcaatgtatgagattaaagttcgatccatccctgatcactattttaaaggcttctggagtgaatggagtccaagttattacttcagaactccagagatcaataatagctcaggggagatggatcctatcttactaaccatcagcattttgagttttttctctgtcgctctgttggtcatcttggcctgtgtgttatggaaaaaaaggattaagcctatcgtatggcccagtctccccgatcataagaagactctggaacatctttgtaagaaaccaagaaaaaatttaaatgtgagtttcaatcctgaaagtttcctggactgccagattcatagggtggatgacattcaagctagagatgaagtggaaggttttctgcaagatacgtttcctcagcaactagaagaatctgagaagcagaggcttggaggggatgtgcagagccccaactgcccatctgaggatgtagtcatcactccagaaagctttggaagagattcatccctcacatgcctggctgggaatgtcagtgcatgtgacgcccctattctctcctcttccaggtccctagactgcagggagagtggcaagaatgggcctcatgtgtaccaggacctcctgcttagccttgggactacaaacagcacgctgccccctccattttctctccaatctggaatcctgacattgaacccagttgctcagggtcagcccattcttacttccctgggatcaaatcaagaagaagcatatgtcaccatgtccagcttctaccaaaaccagtgaagtgtaagaaacccagactgaacttaccgtgagcgacaaagatgatttaaaagggaagtctagagttcctagtctccctcacagcacagagaagacaaaattagcaaaaccccactacacagtctgcaagattctgaaacattgctttgaccactcttcctgagttcagtggcactcaacatgagtcaagagcatcctgcttctaccatgtggatttggtcacaaggtttaaggtgacccaatgattcagctatttaaaaaaaaaagaggaaagaatgaaagagtaaaggaaatgattgaggagtgaggaaggcaggaagagagcatgagaggaaagaaagaaaggaaaataaaaaatgatagttgccattattaggatttaatatatatccagtgctttgcaagtgctctgcgcaccttgtctcactccatcctgacaataatcctgggaggtgtgtgcaattactacgactactctcttttttatagatcattaaattcagaactaaggagttaagtaacttgtccaagttgttcacacagtgaagggaggggccaagatatgatggctgggagtctaattgcagttccctgagccatgtgcctttctcttcactgaggactgccccattcttgagtgccaaacgtcactagtaacagggtgtgcctagataatttatgatccaaactgagtcagtttggaaagtgaaagggaaacttacatataatccctccgggacaatgagcaaaaactaggactgtccccagacaaatgtgaacatacatatcatcacttaaattaaaatggctatgagaaagaaagagggggagaaacagtcttgcgggtgtgaagtcccatgaccagccatgtcaaaagaaggtaaagaagtcaagaaaaagccatgaagcccatttggtttcatttttctgaaaataggctcaagagggaataaattagaaactcacaatttctcttgtttgttaccaagacagtgattctcttgctgctaccacccaactgcatccgtccatgatctcagaggaaactgtcgctgaccctggacatgggtacgtttgacgagtgagaggaggcatgacccctcccatgtgtatagacactaccccaacctaaattcatccctaaattgtcccaagttctccagcaatagaggctgccacaaacttcagggagaaagagttacaagtacatgcaatgagtgaactgactgtggctacaatcttgaagatatacggaagagacgtattattaatgcttgacatatatcatcttgcctttcttggtctagactgacttctaatgactaactcaaagtcaaggcaactgagtaatgtcagctcagcaaagtgcagcaaacccatctcccacaggcctccaaaccctggctgttcacagaaccacaaagggcagatgctgcacagaaaactagagaaggggtcataggttcatggttttgtttgagatttgttgctactgtttttctgttttgaattttcttctttgttctgtttttactttatttagggggactaggtgtttctgatattttagttttcttgtttgttttgttttgtgttgtctgtgaatggggttttaactgtggatgaatggaccttatctgttggcttaaaggactggtaagatcagaccatcttattcttcaggtgaatgttttactttccaaagtgctctcctctgcaccagcagtaataaatacaatgccataatcccttaggtttgcctagtgcttttgcaattttcaaagcacttccataagcattccttccacctccttgataggcatttatggaaagcctgctacatgtcaatcatactgttaggcacaggggacctaaagacacataaaaggatggcattctgcctcataaattgcaaaacctaatgaaagtgactgcttggtaaacaaattattattatattataaaatgctataaaagagccatattgaaagtgccctgttggagacagggcaaatgccacaaaaatgatgtaaatttacatggaggaaaagtagaatctgcctggtttgtaggcagcagaagacatttttcatcagtgggcaggtgttctttaccttttgtagaaatgggagtcaagtctcaaataggaggctccacaaaatctcatgccaggtctctgataccttattcacagaagttctttgaagtatttattgttattttctttgacttatgggaaaactgggacacaggaagacaggtaaattacccaacctcacacgttaagtcagaactgggagccataattttgtatccctggtataaatagacaatctcttgaagaaatgaagagatgaccatagaaaaacatcgagatatctccagctctaaaatcctttgtttcaatgttgtttggcatatgttatctttggaatttagtgtctgagcctctgtctgttactgtagtatttaaaatgcatgtattataatcatataatcataactgctgttaattcttgattatatacctagggacaatgtgtaatgtaagattactaattggttctgcccaatctcctttcagattttattaggaaaaaaaaataaacctcctgatcggagacaatgtattaatcagaagtgtaaactgccagttctatatagcatgaaatgaaaagacagctaatttggtccaacaaacatgactgggtctagggcacccaggctgattcagctgatttcctaccagcctttgcctcttccttcaatgtggtttccatgggaatttgcttcagaaaagccaagtatgggctgttcagaggtgcacacctgcattttcttagctcttctagaggggctaagagacttggtacgggccaggaagaatatgtggcagagctcctggaaatgatgcagattaggtggcatttttgtcagctctgtggtttattgttgggactattctttaaaatatccattgttcactacagtgaagatctctgatttaaccgtgtactatccacatgcattacaaacatttcgcagagctgcttagtatataagcgtacaatgtatgtaataaccatctcatatttaattaaatggtatagaagaacaaaaaaaaaaaaaaaaaa

SEQ ID NO: 368 - DNA, 5445 bp, Homo sapiens
ggggcggggcggtgacgcagccgacgtgaccttcccaacatggcggaggcccgccgtatgtgaaggagtaccccaggggagccaaagccaatggaaaaccgcgagaggcgtcggggcggggaagacggcggccgcttgcccaacccgaggctcgggaggtggctggggagtgaattttctggaaggcgactttaaaggcgccgggactgagcgaagggcgtttgggtactgccgtcgccgccgcccaggccggggaggggtgcgttagtgtcaggaagcgggctgcgccgaggtcgtagcggaaccagctggcgaccccgcagaatgaaccacaagagcaagaagcgcatccgcgaggccaagcggagtgcgcggccggagctcaaggactcgctggattggacccggcacaactactacgagagcttctcgctgagcccggcggccgtggcggataacgtggaaagggcagatgctttacagctgtctgtggaagaatttgtggagcggtatgaaagaccttacaagcccgtggttttgttgaatgcgcaagagggctggtctgcgcaggagaaatggactctggagcgcctaaaaaggaaatatcggaaccagaagttcaagtgtggtgaggataacgatggctactcagtgaagatgaagatgaaatactacatcgagtacatggagagcactcgagatgatagtcccctttacatctttgacagcagctatggtgaacaccctaaaagaaggaaacttttggaagactacaaggtgccaaagtttttcactgatgaccttttccagtatgctggggagaagcgcaggcccccttacaggtggtttgtgatggggccaccacgctccggaactgggattcacatcgaccctctgggaaccagtgcctggaatgccttagttcagggccacaagcgctggtgcctgtttcctaccagcactcccagggaactcatcaaagtgacccgagacgaaggagggaaccagcaagacgaagctattacctggtttaatgttatttatccccggacacagcttccaacctggccacctgaattcaaacccctggaaatcttacaaaaaccaggagagactgtctttgtaccaggaggctggtggcatgttgtcctcaatctcgacactactatcgccatcacccaaaattttgccagcagcaccaacttccctgtggtatggcacaagacggtaagagggagaccaaagttatcaaggaaatggtataggattttgaagcaagagcaccccgagttggcagtcctcgcagactcggttgaccttcaggagtccacagggatagcttccgacagctccagcgactcttccagctcctccagctccagttcgtcagactccgactcagagtgcgagtctggatccgagggcgatgggacagtgcaccgcaggaagaagaggaggacgtgcagcatggtgggaaacggggacaccacctcccaggacgactgtgtcagcaaagagcgcagctcctccaggattagggacacttgtggaggccgggctcacccctgagcagataaagagactctccctgaggtgctttcagcgtaagcttttggcagccacccaactcagttctcgcatcttctgctcctaccttctcctctgtcttctttgaatttggatattccttccctggtccaagctcctatcttcggtcaaatgctgtttttactgcttcctaaggatagattatcaagaaatttaacagctcggccagctcagtgaaacactgaagctaatgggatgttgggtaagaaggttctgtgctgtctcattgaaaaccgagccagtcaaccacaaggctggcagggtgtgatccttgtaacgtcttgtgtctgttacctcacggatgtcggtaaggagtttccacagagccagctgtgtaccacagagactgagagtggtgagtggactttgtgagccaattatgtgtcggaaggacttggagtctgcccttcttcctgtatgtcatcatcagcccacaaatgcattcagtggcagtgacccagcaccatcaccatcacccactgctcagtctgtcttaggattccttatctttttctccatcatcatagagactgaaatttcaggggtgtttttgtacagtgtatttttttgtgggggggtgatacattggggttttttgtttgcatagagtgggaacggtgtgcaatgtgctcttaccacagaacttaaagtatgaataggctccattcttccgcaccatgggatccataagaagtgctcactttgcgaggtactctgagattagcgttccccatttgtttgacctacagacgttaagtgggtgacttgtgttacacacggggagtaaattcagagatggcacctgtagtctttgcagtctgttgatacttctaaataactaactggatgactttttggggattgaccagcagatgccatctcttgccctcttgattcacctgcttgccttaatttgtccctaaattcaactaaacttcaataagaggggttgtcaaggccatggggcgcacttggaagcactgcctgggctggagcgttggaggcattggcaggcaggtgggaaggagctctcactgcagtgttcacaggcagggaggctgtgtgtggatgtgttagaattgtgtgctgttgcctctcaaaatatccactagaaacaggtgtaaccaggaaaatacaggtctctgctcactgttattaacagactgtcatttcctgacattgggtcatgtggctttactctaggaggctggttctctatttttgtcttagttcaattttctgcatcctcaaatgccaaccccagtatgtggctgggtaggtagaactgtgctgcctgcctgccatgggggctgctctccctccttacccccacgcccacagcccccttggttctgtggtgggcacaggatgtgtttgggtgtgagtaaagtcaaactctgaatgtataatctcttggtagtaatatctgagtggtgttgctactcctgctttttaaaaagacttttcttgccatctataaaaagcttttttctttttcccagcattgctcctgtgctgccacgcttgccctttttccttaccttcctttcagttttctatcaacaactcctctaaacttcagtttaaaataaaaaacagcccaaaaaggctctttgccaccagggggcgtggtaggacacgttgccagtggtctggataggggagcagaaattttgaattttaaaaattagccaccaaggccaggtgcagtggctcacacctgtaatcccagcactttgggaagctgaggcagggggattgcttgagtccaggagttcaagaccagtctgggcaacatagtgagatcccatctctcaaaaaaataataatctagaaaataaagattagccacccagttttctttctccagatgctaaagttgattcctgtttgataacagtattccagaaatgaggggaataacatatctgataggcccaagtcagctctggatagtacagtgtctggatagtacagattctgtgctcctgggacatgctttgtttattcctgccaggccagggattcagcagccctattccccaacccccgttactgtctctgtgggctagccaggctgtccgttatgtaagcacaacaggggcaaggtggggaaaccgtgtgtggaaaaggagtggagtggtggcgggtggccaaggtagactaggaagagtgggtacccagagaccacttgttcagaagttaactcctcttcccatctggcgtgagctactccattgaatggtgccaacaacagtaaagtgaaggagataatgttagattattttcagggatgattctccaagatgacagcagatcttaaaaccaaagagctgggtcctggaagaagggatcttggattattaacttctgatggaaggaccagagtgggagagagaagagttggggacctagaacatcaggaggaccctgggtctttggggatgaggcttcaccatcagctggaagaatccatgcttcacacacatgcctctgccattagtggtactgggatgtttagggtgacatccttgaggggagagccactgaaaagagggacattcacattttgctgtattcttgcagctgtccgtgtcttaataattcaagcgttcaataggtgtttgagggccaggcactgctcttgaggtgctggagataacggtgacaagcccaggtccctgacaagctccacaagcttaatggacagtgaatgtgcggctgttgcggctgttcacagggccgctggtgagggcaggtagaagaaagtgcagaccttcttaaatgcaggtgtaacggatctacatgaaagagcataattaacaccaatgtatacttaaggtagtaacagcttcttcataaagtagcaaaactaaggatctgtgggaaggttgctggtgcaaatgctttataagcttactagagactgagccttggatttaggactttagacgagtataggatggaacaaaatttttgcagtaaatgtaaaaaatgctgtgtaggaggaaggcgtataaggatgccccagctgtaggttctttagattgtctgtagtatttccacgagtaagttgtttttgatgtgtgtactggtattgctggtagatttgaagtggagtctggcggcttcttccacactcccctcccactagcttgtgtcaagatgtgacatcctatgcagcaaaactaggtgagcttgcacccccaggcggtggctctcaactttgtctcattgttcagaaatttcggccaggcgccgtagctcacccctgtaatcccagcactttgggaggccatggcaggtggatcacttgaggtcaggagttcaagaccagcctggccaacacggtgaaaccccgtctctactaaaaatacaaaaattagccaggtgtggtggcacatgcctgtagtcccagctacttggtcaactcaggcaggagaatcacttgaacccaggaggcagaggttgcagtgagctgagatcaagccactccagcctgggtgacagaccgagactctgtctttaaaaaaaaagaaatgtcatctaagccccagtgaacctcctgggaggagagctagccctggccagctgtctccaaagtgactggatgctacagaagaactgggactgtcttctgcacactcgtgcctcctggagttgtcagaacactgagcagtctcctagttctgcgtccgtctagccatggggtctgccatgaaagcctgtggatctgctattgggttggtattttaaactttcacttgggtgaaacttgttcatcattttaaataaagcaacatgatttggagttgaaaaaaaaaaaaaaaaaaaaaa

SEQ ID NO: 369 - DNA, 1527 bp, Homo sapiens
agttcctcatctgttgctttttcattttgtatactgcaagttcccaggcaactcgaatttgcaaacacagccatggatacactatttaccttacagtagtttcctgggaatctaagtctggtttttgttattcttccctcccctccactgcataatcatgtataactagcaacatttatggttataggttgatttcctaagtgtggctgatggtagcctctagtttgaagtgagggaagaatgagtagtcaggaactggtcactttgaatgtgggagggaagatattcacgacaaggttttctacgataaagcagtttcctgcttctcgtttggcacgcatgttagatggcagagaccaagaattcaagatggttggtggccagatttttgtagacagagatggtgatttgtttagtttcatcttagattttttgagaactcaccagcttttattacccactgaattttcagactatcttaggcttcagagagaggctcttttctatgaacttcgttctctagttgatctcttaaacccatacctgctacagccaagacctgctcttgtggaggtacatttcctaagccggaacactcaagcttttttcagggtgtttggctcttgcagcaaaacaattgagatgctaacagggaggattacagtgtttacagaacaaccttcagcgccgacctggaatggtaactttttccctcctcagatgaccttacttccactgcctccacaaagaccttcttaccatgacctggttttccagtgtggttctgacagcactactgataaccaaactggagtcaggtatgtttctataaaacctgataaccgaaaattggccaacggaacaaatgtcctcggcttactgattgacactttattaaaggaaggctttcatttggtcagcactagaacagtatcttctgaagacaaaactgaatgctatagctttgaaaggataaaaagccctgaagtgctcatcacgaatgaaacaccaaaaccagagactatcatcataccagagcaatctcagataaagaaatgaagttgtctatcctcttttaaagagaaattgccatttttcttgtttcattacgtatttagggcatacatgttagccaaatctacactcagcctaactcttggcttcatctgctgccatgccgtctctgggcaaccaggccccaactgtgcttaagccataatgcctgctgctctctagacaactccatgtacttggtgctttggtatatgttctaccttcaatacatctttccctttctcttcttcatgaatgcttatgagccgagattgcgccactgcacactagcttgggtgacagaggaagactgtctcaaaaaaaaaaaaattgatcaaactgatggataccctaagtaccctgacttgatcattacaccttctatgcatgcaacaaaatgccacgtgtaccccataaatatgtagaaatattatatgtaaataaatagttgggccttccgtattttcccactta

SEQ ID NO: 370 - DNA, 4057 bp, Homo sapiens
ccccgcctccgcccccggctggcgtgagctgggtgtttcctgcctctctcagtccgggtttggagactcctgcgtcctccgacttttcatggaagagatgtcaggagaaagtgtggtgagctcagcggtgccagcggctgctacccgcaccacttccttcaagggcacgagccccagctccaaatacgtgaagctgaatgtgggtggagccctctactataccaccatgcagacgctgaccaagcaggacaccatgctgaaggccatgttcagcgggcgcatggaagtgctcaccgacagtgaaggctggatcctcattgaccgctgtgggaagcactttggtacgatactcaactaccttcgagacggggcggtgcctttacccgagagccgccgggagatcgaggagctgctagcagaagccaagtactacctagtccaaggcctggtggaagagtgccaggcggccctacaaaacaaagatacttatgagcctttctgcaaggtccctgtgatcacctcatccaaggaagaacaaaaacttatagcgacttcaaataagccagccgtgaagttgctctacaacagaagtaacaacaaatactcatataccagcaattctgacgacaatatgttgaaaaacattgaactgtttgataagctgtctctgcgctttaacggaagggtcctgttcataaaggatgttattggggatgaaatctgctgctggtccttttatggtcagggccggaagattgctgaagtctgttgtacctccatcgtctatgccactgagaagaaacagaccaaggtggagtttcccgaagcccggatttatgaggagaccctgaacattttgctgtatgaggcccaggatggccggggacctgacaatgcgctcctggaggccacaggcggggcggcggggcgctcccaccacctggacgaggacgaggagcgggagcggatcgagcgcgtgcggaggatccacatcaagcgccctgatgaccgggcccacctccaccagtgagcaggcaagagaccgagccgccctcctctcaccgcccccactccctgccgtgctacacccagatcctgtgcaggctgccgggccccttctgcttcccttggagcctggagatacttttgtaacaagccagatgattattttggtattgcttgacaaggcaaattgattgtcttgacccaggcgtatgacccctgtcgttgaacaagctgtgtctaagatctctacttttcatgagaatctgagactctttggagccaggctttctcggttctcagaggaaaagtatgaatgagtgtgaagtgtatgtgagaacttttgtttgcaatatttatttttgtgggtgtcgacttcctatgtgggctttttgggtgacactcccttaagggttcagtttgacaattctgagagttgtcctgcagttggaggccaccagaggtatctgagctccctgcttcctatttcataatcctccagccccagcaggtccactcctggttcctgtgtgtttggcccgggcacaatccccactgctttgctagacgtgctttctgccatgtggctttgggcctagagcttgttgataattgcagcttgtggcagtggaaatatggctgaatgagcgtctaaatcgttgagaccagtgcaactttgggtgcaaggctttgtttagggatcaagccttttgccaccttgggctggtctttggcctggtgctcactgggaccccatatgtctgcgtaggagcagaactttccatggcagtaagtgtccagctctgtttctggttctttccccaactccagccccgtccagttgttctcctgattgacccgactccactccaggaaggccatctgaccctgtgacaggcatagctcataaactacccctccctgggatcccgctcctcttcagcctccttccccatgaagctgggctaactttctaagtcattttgcttagaaattcagtgtggcccataccctttgtcctcccagcctggcatccaggcagggacaccctcacaccaccagccccagggagcttccctgctataaacacagacccccttgtctttgcctctgatttttacacagtgtagagtggccagcagtgaacaggttgaggatgtgcgggtagatagataactttgggtctggtttgtgtctgtgttcatgtttgtttaagggatatgtgtgactgtgggtggggacgtgtgcttgtggggcacaggtggcggcccctgctggagcccggctgggcgcagcgcctatgtaggacgggtgttctcagtgacctacctcccaggctcctctgcacctgcaaaggaacaggagtgagtcgtgactgacaggggtggttgagactagactaggtagagtagttaccaggagatgtgaatgtgcgtcaggtgatggatgggtttgtcaagggaatcgttaccgttttataccaaaggtattaacatgggcagcctttgacacatgtattccaaaaacgagtttatattttcaaacggtttttacagcttagactttgtacttactgccctgcctgtgacagttgtatgccttcattttgtatccaacagcaaagtctacaataaaactttaaaacaatcatgactgaatgtcaaaatcgtgtattgggcagatgctttttaaactgtcgtgtgagaaacttttatattaggccatttggattttattaagtgctaaggaaagagggcttacaaaatgtttcgtaaatattttatactgtttaagtgttaaacaccaaccctgtctttcttttgggttgagcttttttagaaagtcgaagtgaatgttggccaggaaaatggaaaagccattgtataaatttttttttgaggcggagtcttgctctattggccaggctggagtgtagtggcaccatctccacttaccacaacttgtgcctcctgggttcaagcgattctgctgcctcagcctcccgagtagctgggattgcaggtacccatcagcccatgcccagctaattttgtatttttagtagagatggggtttcaccatgttggccaggctggtcttgaactcctgaccctgtgatccgaccaccttggcctcccaaagtgctgggattacaggtgtgagtcaccacacctggctgcatagtgttttaaatgtttgtgtgaagaatgagtttgtggaacaatttgatttgctgtggcctctatgcctaatgagctagtgtttctggcagctctctctacccaactttgcacttgtagttttgagtctttgtctctctggaatatgaacaggtttataaaacattccatggtgaacaattctgtcggctgcattatagccatgagtgaatagacagcattggctggtccaagctctgttattgagtatacaaggaactgatttttcttatgttagcactaagggcaaaaaccaatatttataatgtaagcactatccaggtaaaacactggcccaagatttggtaaagagatttcattgcaatgtaataactacagttttttacaaattggaacagctttggtgtgtcgtaatcaagggttttttttgtttgtttgtttcaaataagccatctgattgtggtgactggggcccatgtccaagacaattcctggcatattctgtcaccctcccgtggggcgatcactgtgtggggaccccattccccagttaaagtgtgtctctgtaccttacaacagcgattcaggacccaagtgtgaacaacactcagcccgccctctggagcgtgtgctgtctttagggccctacccaaagtcactgtaacagttaagtgtgtcattaacctttctgtctctttgcgccataaaaaaatgctcaaagttttagatgtagccactgtatgttgtacaaacgttggcgacatgtaaaataaaagtcataaaatgctaaaaaaaaaaaaaaaaaaaaaaaaaaaaaaaaaaaaaaaaaaaaaaaaaaaaaaaaaaaaaaaaaaaaaaaaaaaaaaaaaaaaaaa

SEQ ID NO: 371 - DNA, 3081 bp, Homo sapiens
attagaggctccagccccgccgacttgcagacgtgagatcgggcacacctgagcggcggcggggcggtcgtggccacatccggggcgacgtgcctgagtcaccccgtcccgccagcgtctgccagtccagccagtccgcccagtctctcgcgtccgagactcgcctccagcctcccacctccgcccgggccgcgcgagcctcgcgggggcgggggcggggcgccaaggggcggggctgtctcttaaagggccccgggccgctgcccttaggccacttcctgggggcggagaggacctcagcggctgcggcgacacccagggaaggcggcgcggccgggtcccgaaactcctggctgtttccatcagagccctcggacactcccagcccgggctgagcacgcatcgtcgctccccggcggatacaagggggctccgccatccgctcccgtcagttcggcctccatctcctgggacccgcgccggcagccaggccaggcctctgagtggccccagagccctggctggactcgtccacggcggcagcgatctgcccggggtctcggaggccatcccttcagagtcggccctgtgctcgccaccgtcacctgctggttggattccggaaacccactgtctgaagaccacagaggggtgtcgctgaccaccccaaatcggatacgtccagacctcaagctcccttcccctctctggctgccctctgctcttttcatctcttctctcaaccttttggggatttctgtgtcctgacaccacctccccatccaccaccaaagtagccggggtgagccccaaaccttactgggtgtgctccacctgtgcctccaacccagcgaatctgacagcttcgacccaattctgcacacacccaggaagttctgccttttcttttctttcggtgtctcctgtacttcccaaaatttctcctcctcctgtgccctcttcgcccccctcctttgggggccccgtgaccctgaatgtggggggcacactatattccaccactttggagaccctgacccgcttcccagactctatgctgggggccatgtttagggccggcacccccatgccccccaacctcaattcccaaggaggcggccactacttcatcgaccgggatggcaaggccttccggcacatcctcaatttcctgaggctgggccgcctggacctgccccgtgggtacggagagacagcgctgctcagggcagaggctgacttctaccagatccggcccctcctggacgcgctgcgggaactggaggcctctcaggggacccctgcacccacagctgccctgctccacgcagatgtagatgtcagcccccgcctggtgcacttctctgctcgccggggaccccatcactatgagctgagctccgtccaggtggacaccttccgagccaaccttttctgcaccgactctgagtgtctaggtgctttgcgggcccgatttggtgtggccagtggggatagggcagaggggagcccacattttcatctggagtgggccccccgccccgtggaactccccgaggtggagtatgggagactggggctgcagccgctgtggactggggggccaggagagcggcgggaggtggtgggcaccccaagcttcctggaggaggtgctgcgggtggctctcgagcacggcttccgactagactctgtcttccccgaccccgaagacctgctcaactccaggtctctgcgctttgtccggcactgaggatgctgttctcagtttgactgtggggaggagagagaatggggtactagcacccctgaagcctctttccagctctgcttcaggagctatgagagtcgggactctcctgcacctgactggagctcagatgtgggcaggaattcccaaacctgagcccaccaaggactcacaagtggtccagaaggtctcaacctgtgctgaccctgggaggggtagggaaggttctctcagcttgttcttgcctaaggctgagcacctccagtctctccttgatttggagctcagtgtttaagggcttggaaaaggggggaacatctctttacccagactagacctagcaaaaccctggaaggatattgaggtctggggaaaagggaggactttgcattttcccaatgcggtctcttggaccatggcttctactcctgaagctgggtggcctggcctggcctgaccaatgagaggccagaacactctggaacatcggaagaggagttctttgctatgttccaagccatctactgagggaggcagaaaggccacaacccaccctaggttgatgtatgggagctaggacagtccccatggcaatggggctggagcatccctcatctggaagaatcccatactgatggcagggctggccagggggaagagggtagtatctgtgggtcctggcctttcttcatgtgtgcgtgcatatcagcccgtgtggctgactgatgtataggtccctggcatcctggttcatatctgtgttgctgactacagtgtctgtgatgtccgcatgtccaggcctgtttggggttgcctagcgactcttctggcacagggtgtgtctgtggtatacctgtgaggtggttgacaattagtagtttaatcacagggtgtgtgtgtgtgtgtgtgtgtgtgtgtttatgtgcacgcatgtatatgcatcaccacgtagccaggaggggcctgttggggtttgagtcactgggatcttcctggtgagaggtaagagaagtcactgggcttagctgggcctctgaggcctgtatggaactcttggttgctgaggcaaccatggacctgttgctaggagatagctggggaaggcccaaggccgcccagggcagagagaggagacgaagagtttgggacagtgggggaggagatgggaagggatgggatttctgggtcccagagcgggtgggatactcacgcacagcttcttcactggtggggggtggggcacacattatttctcactggtcatgatttacaagaagaaaaataaaactgcttttggaaccacaaaaaaaaaaaaaaaaaaaaaaaaaaaa

SEQ ID NO: 372 - DNA, 2959 bp, Homo sapiens
cacttccgcgtccgccccgcggcgtccggcggccgcgccgagggtctggcgggccgcaggtcagtctgggaagctgccgacccgccccacccccccggtgcggaagagccgggcgcgggatgggccgcgggcccggaaggcggcggggcgccctgaggaagggcacgggccgcgctggtaacgcgcgcgccccgggctgcaggctcgggcttcgggccgatttggggtctccaggccgcggaagaccgtggcggggctttctggctccccagctcctcccggctcttcccgcttcggaagaggagtgtgagccccttgagcgatgtttttcaaagtggggttcgcgggcagatcccgacccctcctcagactttctgaggaactgtgtgctgtggccggagtgtcttcgttttcccaagcgtccctgatggttttgatgcagagggagaccaagacatcattgttttgaagtttctgaaagtgttgggcggcaaaaattcaggtgcctgggggagaaatggaaggccacaaggcagaagaagaggtgctagatgttctccgactgaacgtgggtggctgtatttacacagcccggcgggagtccttgtgccgcttcaaggactccatgttggcatctatgttcagtggtcgctttcctctaaaaacagatgagtcaggggcttgtgttattgaccgtgatggacgtctatttaaataccttttggattaccttcatggagaagttcagattcccacagatgagcaaacccgcatcgccctacaggaagaggctgattactttggcatcccttatccatacagcctgtctgaccatttggccaatgaaatggagacatattctttaaggtcaaatatagaacttaaaaaggctttaacagacttctgtgattcatatggcttagtctgcaataaaccaacagtttgggttctccactatcttaacacatctggtgcaagctgtgagagtagaattattggtgtatatgccacaaaaactgatggaacagacgctattgaaaagcagctgggaggaagaattcacagcaaaggcatttttaaaagagaggcgggaaataatgttcagtacatttggagctattattcagtagcagagttgaagaaaatgatggatgcctttgatgcttgggaaggaaaaggtgttagctactggcgggtgcctcatgagctgatagagtgttggactctagaagaacggcctttacttggaagcctgcgtcacatggctccaattcgaaagaggcgactgataacgttcaatgaagcggacgaaagtgtgaactataagactggtcctaagccagttagatttttgggcccttccacaagtacccaaattaaagtcaagaactcggcctcagtcacggtgtctccagccagtgccatccagacgtcggctggggcgacagcaaaccggtttcaaagtggtagccgcagaaaggcagctcagcgctctgcaccttccagagccacggccctggtgggcacgggggcacctgggcatcctcaggcttcccctggggctgcgagcgctgaaaatggaggcacgcacttacctccagctaaggtgctactctccgacaagaagcctacaccccagcgggtgataaagctgaagaggactccgctgtgcgccaccgcgccttgcctgccctcccccacggccacgaggcaggccaactccctcaagccgcttcccggcgaagctgcccgtgccttgggagtgcggactgagaacgggaagaacaagggaaattgatgaaagtggtggacttgaaatttcccgttcatctcccaaagctttcaacccattcgacgcaaagaagtgacactttcttaatgcagcagaggggaagcttaggtttatgttgaggattctgttcctggaattgtgtgagctaggaatggaggaggggagactttcaatggttaaggctccatttctcattttcccaacttttatatgattgtctatgggcagtttgaatttctggttttcaatttattttttaatgattaattcgtattaaggcaacaagacagtacaacaaataatctctagagaggtccactttgttgctgaagtaaacgttacttgttgcaacccgaggatgggcatgaggtttggccttaggtattcctgtctgggaaaatggagggggtgatattagtggttccctgtactatatcacagccaagagagattagagagagaaaatgtagatcaaggcgagctgcctacaaattactctgtctccaaaggcaacgtgaaaagaaatgatggggaggaaaaaaccccatagattgaattagcactttgactctcacttaattcaacgattttctttcctagattggcttttcttactcttttctgttagtagatttatttataaacaccacaagaagatctcttgggatcagaattatataatatctttgaagtaaattattaaaatatcctatttaatttgaatagtgaagttttgaaaatactttgaaaaagagaagtaaaagtttaactttttaactaaagttagtatttgtttttcagaaatgaccactgaagattcattctgattatacaatatgatttttatgcataaaatttccatgtaacttgaatttaatatttttaaacagaatattttgactaatcctctattttttcatgactattcagttgtgtgtgtttattcgtaaatgttatgttttgtaattggatcacatatttctactttcagtgagagtatgccttcactatgttaaaaaataagctcataaaacagggtactttttattcaaatgcttatcattgtactttcattgctttgaaagagtaaagtaagtatactcaaaacattacgttttacaaaatcaaataaaacttttccataaaaaaaaaaaaaaaaaaaaaaaa

SEQ ID NO: 373 - DNA, 5600 bp, Homo sapiens
ttattgttgctcctgtggccattctcttgtcatccccactttcacattttggcgtggtgtattaatagactgagtgggattaatgggtaaatatgactttatagtcagctctaatcctggattcaatatcagaatttagattttcagctttgtggatgttcgacattttaaaaacagttattgcaaagaggtgaaaattttgttctgaagtcttaaggaaacagagaaagtttttccgtccttaagtgtgggacttgttttgtgaccaacaatatgaaaggctctgaggtcagcttggagaagaaaaaaaagattaagatgccagtgaagagacttcgtgaggtagtttctcaaaatcatggagatcatttggttttgctgaaagatgagttgccctgtgttcctccggcattgtctgcaaataaacgtcttcctgttggaacggggactagtttgaatggaacatcacgtggttcatcagacttaacttctgctagaaattgttaccagcctctattagaaaatcccatggtgtcagaaagtgatttttctaaagacgttgcagtgcaagtgttgcctttggataaaatagaagagaacaacaagcaaaaagcaaatgacatcttcatttctcagtatacaatgggacagaaagatgctctaagaacagttttaaagcaaaaagctcaaagcatgcctgtttttaaggaagtaaaggtacatctgttagaagatgcaggcatagagaaggatgctgttactcaggagactagaatttcacccagtggaattgattcagctacaaccgtggctgcagcaactgctgctgccattgcaaccgcagctccgttgataaaggtgcagagtgatttggaagcaaaagtcaattctgttacagaattacttagtaaattacaggagactgataaacacctgcaacgtgttacagagcagcaaacaagcattcagaggaaacaagagaaattacattgtcatgatcacgaaaagcaaatgaatgtgtttatggagcagcacataaggcatcttgaaaagttacaacaacaacaaatagatattcagactcattttattagtgctgcactcaagactagtagttttcagcctgttagtatgccctcctccagagcagtggaaaagtattccgtaaaaccagaacaccctaatcttggtagctgtaatccatctttatataacacatttgcttccaaacaagcacctttaaaagaagttgaagatacgagttttgataaacagaaatctcctttggagacaccagcacctcgcagatttgctcctgtacctgtttcaagggatgatgaactatcaaagagggaaaatcttttggaagaaaaagaaaatatggaagtgtcgtgtcacagaggaaatgtaagactattggaacaaattttgaataataatgattctttgacaagaaaaagtgaatcatcaaacaccacctcactaactaggtcaaaaataggatggactcctgagaaaacaaacagatttccttcctgtgaagagctagaaacaactaaagtgactatgcagaagtctgatgatgttcttcatgaccttggccaaaaagagaaagaaacaaatagcatggtccagccaaaagaatctctgagtatgttgaagcttccagatcttccacagaattctgttaagcttcaaacaaccaatacaacaagatctgtattgaaagatgctgagaagattttgagaggagtacaaaacaataaaaaagtacttgaagaaaacctggaagctattattcgtgcaaaagatggagctgccatgtattcgcttatcaatgctttatctaccaacagagagatgtcagagaaaattaggatcagaaagacagtggatgaatggattaaaactatttctgcagaaattcaggggcttttgaaagcaaccacagtaatacaagatgaagattatatgttacaagtctatggaaagccagtttatcagggccatcgaagcactcttaaaaaaggaccatatctcagatttaattctccatctcctaagtccagaccacagagaccaaaagtaatagaacgagttaaaggcactaaggtaaagtcaataagaacacagactgacttctatgcaacaaaacctaagaagatggattctaaaatgaaacattctgttcctgtgttacctcatggcgatcagcaatatttgttcagcccaagtagagaaatgcctactttttcaggtacattggaaggtcatctgattcctatggcaattcttttaggacaaacccaaagtaatagtgataccatgccacctgctggagtgattgtcagcaagccacaccctgtaactgtgactacttctattcctccatcatctcgaaaagtagaaactggagtaaagaaacctaacatagccattgtagaaatgaagtcagaaaaaaaggatcctcctcagcttactgtgcaggtattacccagtgtagatattgacagcatttcaaatagtagtgctgatgtcctttcacctctgtctagccccaaagaagcatctcttcctcctgtgcaaacttggataaagactccagaaattatgaaggtagatgaagaagaggtgaagtttccaggaactaactttgatgaaataatcgatgtcatacaggaagaagaaaaatgtgatgaaattccagactctgaaccaattctggagtttaacagaagtgttaaagctgattctacaaaatataatggtcctccatttccgccagttgcttctacttttcagcccactgctgatattctggataaagtaattgagagaaaagaaacactggaaaatagcttaattcaatgggtagagcaagaaataatgtcaagaattatctctgggctctttccagtccagcaacagattgcacctagtatcagtgtttcagtcagtgagacaagtgaaccactgacttctgacattgtggaaggaacaagcagtggcgccctccagctttttgttgatgctggtgttcctgtgaactcaaatgtgattaaacattttgttaacgaagctcttgctgagaccattgctgtcatgctgggtgacagagaagcaaagaagcaaggtcctgttgctacaggtgtttctggggatgcttcaacaaatgaaacatatttgccggcaagagtgtgcaccccactgcctaccccacagcctacgcctccttgctcaccttcatcacctgctaaggagtgtgttttggtaaagactccagattcttctccctgtgattcggatcatgatatggcttttcctgtgaaagaaatatgtgctgaaaaaggagatgatatgcctgccatcatgcttgttaatactccaacagttacccctactactacacctcctccagcggcggcagtttttaccccaactttgtcagatatttccattgataaattgaaggtatcaagcccagagcttcccaagccatggggtgatggagacctgccactggaagaagagaaccctaactcacctcaagaagaacttcatccaagagctattgtaatgtctgtggctaaggatgaagaaccagagagtatggatttccctgctcagcctccacctccagagccagttccctttatgccatttcctgccggcaccaaggccccttccccctcacagatgccaggttctgattcatcaacactggagagcacattgagtgttactgtcactgaaactgaaactttagataaacccatctctgaaggagagattttatttagctgtggtcaaaaattggcccccaagattttagaagatataggactgtacctgacaaaccttaatgatagcttatccagcactctgcatgatgccgttgaaatggaggatgatcctcctagtgaagggcaagtgattaggatgtcccataaaaaatttcatgcagatgcaattctttcttttgctaaacaaaaccaggagtcagcagtttcccagcaagcagtctatcattcagaggacttggaaaacagtgtgggtgaacttagtgaaggacaaagaccccagctaacagcggcagcagagaacatcttaatgggacattctctctatatgcagccacctgtcactaatacacagtctttggatcaacaatgtgatcctaaaccattatctcggcaatttgacacagtttcaggtagtatttatgaagattcatgtgctagtcatggtccaatgagtttgggagaattggagttggagccaaattctaagctggttcttcccacaacacttctgacagcacaagaaaatgatgttaatttaccagtagccgctgaagatttttcccagtaccaactaaagcaaaatcaggatgttaagcaagttgaacacaaaccatcacaaagttacctacgtgttagaaataaatctgatattgcaccttcacagcaacaagtttcaccaggtgatatggatcggacacaaattgagcttaatccgtacctcacatgtgtattttcaggtgggaaagcagtgccactctccgcttcacagatgccccctgccaagatgtcagtgatgctgccgtcagtgaacctcgaggactgctctcagtctctgagtctcagcacaatgcaggaggacatggagtcttcgggggcagataccttctgaacgggaagagacagccagcacagtgtttatgccactggttttaaagtcattttaccttggcttaaaaccctctctcagactgtttggtttttgagcatattctgaaaaaaaaattccaatattttaaaataaaacaaaaagcataatttgggtatttaaagtttttaaataaaataagtataagtcattataagtctgattgtgagttgtttcttagaatcctgagatagcatagagtagtgaaagggcatggcttttgacatctaggcatttaatctataggtgtaattatctgtatgtatttataaaattatgtagctcaaggttattcattctaacatttttataacagcaaatagaaaaaatcaaatgtctatcaataatagactggttttaaagtgatggtacatcagtacaatggaatactatgtattacaaaaaaaaatttaaaaagtttattgatatggaataatctttgagatgcactgttaaagtgaaaaaagccatgtgcaaaatagtgtgtgaactatgcagttgttgaaattatttaaaatggggtggggaggaattcaaatgtatggtatgtcacatattcttacatgtatttgcttgtaaatatattatataaacaagaaactgctaagtttgtctccagggagtagaattgttggctgggtgataggagaggctaagtgataggaatcaaggataatcgtggttactatgtatttgaacttcagttgtgatagaaaaaaatcatcagtgagattaatttttatatgccttatgtataccatataaacctttataaacctgtgaaacatgtaactctattaccttttgcaacataaatacataaaattaaaggaaaataaaaagcattgcttcgtaatcagataaaaaaaaaa

SEQ ID NO: 374 - DNA, 4219 bp, Homo sapiens
ggctgacgtgtctgcagttcctccgcgtctactgcgagtcaggccgtgatggcggacgcctgggaagagattaggcggttggcggccgacttccagcgggcgcagttcgccgaggccacgcagaggttgtccgagcggaactgcattgagattgttaataaattgattgctcagaaacagctagaagtagttcatacactcgatggaaaggaatatattactccagcccaaattagtaaagaaatgagagatgagctacatgtccgaggtggtcgagtaaacattgttgatctacaacaggtaattaatgtggacctgattcatattgaaaatagaattggtgacattattaaatcagaaaagcatgttcagttagtgttgggacaactgatagatgagaattatttggatcggttggcagaagaggtcaatgataaattgcaagaaagtggtcaggtcaccatatcagaactgtgtaaaacttatgatcttcctgggaactttctgacacaggcactaactcagcgacttggtagaattatcagtggacatattgatcttgataatagaggagtaatttttacggaagcttttgtagctcgacataaagcacgtatccgtggactattcagtgctattacccggcctacagctgtgaattctttgatttcaaaatatggatttcaggagcagcttctttactctgtgcttgaggaacttgttaatagcggacgcttacgaggcactgtggttggtgggagacaggataaagctgtgtttgtccctgacatctactccaggacacagagtacttgggtggattcctttttcaggcagaatggctatctagaatttgatgctttgtccagacttggaatcccagatgctgtaagctacataaagaaaagatataagactacacaactcttgtttttgaaagcagcttgtgttggtcaaggacttgtggatcaagtggaagcatcagtagaagaagccatcagctctggaacatgggttgatattgcacctctgctacccacttctttatcagttgaagatgctgccatattgcttcagcaggtgatgagggcattcagcaaacaggcctcaactgtagtctttagcgacactgttgtagtcagtgaaaaatttataaatgactgtacagaactgttccgtgagctgatgcaccagaaagctgaaaaggaaatgaaaaataatcctgtgcatttaatcactgaagaagatctgaaacaaatctccactttagaaagcgttagtacaagtaaaaaggataaaaaagatgagcgaagaaggaaagcaacagagggcagtggaagcatgagaggaggaggtgggggcaatgccagagagtacaaaattaaaaaagtcaagaagaaaggaagaaaagatgatgatagtgatgatgaatctcaatcatcccacactggaaagaagaagccagagatcagttttatgttccaggatgagattgaagattttttaagaaaacacatacaagatgcccctgaggagtttatttcggaacttgctgagtacttaataaaacctcttaataaaacttatctcgaggtggtacgttcagtattcatgtcttcaacaacttctgcttctgggacgggcagaaaacgcacaatcaaggacttgcaagaagaagtttcaaacctgtacaataacattaggttatttgaaaaagggatgaagttttttgcagatgacacacaggctgctcttaccaaacacttgctgaagtcagtgtgtactgatatcactaacctcattttcaacttcttagcttcggatttaatgatggcagtagacgatcctgcagccattacaagtgaaataagaaagaaaattttaagtaaattatcagaagaaaccaaagtagctcttacaaaactccataactctctgaatgaaaagagcatagaagactttatttcttgtctggattctgcagcagaagcttgtgatattatggtgaaaaggggagacaaaaaaagggaaagacagatactgttccaacatcgacaagcactggctgaacagctaaaggtcacagaagaccctgctcttattctgcacctcacatcagtcctgttgtttcagttttcaacccacagcatgctccatgcacctggaagatgtgtcccacagatcattgcttttcttaatagtaaaattccagaggatcagcatgctcttttggtaaagtatcaaggtttggttgtaaagcagctagtcagtcaaagtaagaagactgggcagggagattatcccttgaataatgaattagacaaagaacaagaagatgttgccagtactactcgtaaagagcttcaagaactttcttcatccattaaagaccttgttctcaaatctaggaaatcatctgtgacggaagagtaatgatcttaatttacatttgtcatatagtaagcattttcccccaaggttgaaggtgagtggtcacaaaaaagtagtcactatacaactcccctctccctgcaaaaaccacctcatacacacacaattcagttaaaacagtagtattgtattaaatgtaaatcttaaaaagatgtgaatttttgtaaattgggttcttcatggaagtttttttccacctgattttcacacaaatactatatgaaatttttcacattattttcacataattttaaaaattacatatttcaggtttgttctctttccaaatgttgaatgaaaaacaaattttccaatccatttatccctggggaaggattcatttgttgcgagtgccagtatacttaaatgtatactttatatacatttaagcagaaatttaaaatgtggtcttttttttttaaaagaaacacttctgtgtcagaaatgaaaataaatcatgttttttatttttaaatagaaagcacttcaaaactaaaatacagaaatttacaaaaaagaaaaattattactaagcccttgctcttatttttggcagaataaacattgattttggttggggctgcaaggatgcctttacaggtgcacaagaacgctagagtggcccatgcattgctgtgttctcttctaaaacaagctactaacaagagagagaacacatgcaatttattaccagtaagcataagtcatatttaacattggaataactaagcattttatacaaagatttttctttgacccagtttgcatttgtacattttatttttttagttcaacagctgctctgtcacataatactttgtaaatactagtgtgaaaaacagataggatgccttttccagtggtaggagcatctgtaagtgcatttaaatcattagaagcttttttccaaaactagaaacccttattaaaaaatagacatttttttctaaagattattagttaaaaataactaaaagagttccttagagtaatcatttcaaccaaatgaatttcaagcaacaacttacttactatttatcaaaaagggatttaattattttgaatataattataaattaaatttcaaatatttaaaaatactattttatataattccttatgacattttaaactttatattttaaaatatttgaatacgaaaagatcagtctacctctactccattctagacaaagtattaatccttagtgaaagtaattaattaaattgccaacttggcattattattaaacttgataggaacgcaacattaaatttaaaaatgttttcccgtgggtaattttctattatatattttcatatgggcaaagggaaaaaatgataaatcctctgtaatcacaaaccccaatttcgttttgtttattcagcttctaaaatattgaacacccagacttttaattcaacctttaagaaccttatcatttatgtttcagtagatatcaaagtaatccatgtttgtgtcaaatgatcatagaaaataaatagaagagacagtgaagcaagtaaaaagaaaagcattgttttaatttgtttgcattaatttttttcatttgtcaaaatgcttcttttgttgccacagtaaagaacagtttttattgttttgtaagtaaaattacgtagctgattttgtatgtaaagattaatttccataataaaaattattgtatgtttactgtgatcttaatgggcagggttaagaaagttatttaaaataaagttacctattctactaaaaaaaaaaaaaaaa

SEQ ID NO: 375 - DNA, 5034 bp, Homo sapiens
agcgagctagcggcgagcgcggcgagcaacggagaggagcgcgagcagcagcatggcggggctccgacgcccgcagcccggctgctactgccgcaccgcggcggccgtgaacctcctgctgggcgtcttccaggtcctgctgccctgctgtcgcccgggaggggctcagggacaagcgattgagccgttgccgaacgtggtggagctgtggcaggcagaagaaggggaactcctgctgcccactcagggtgattctgaagagggtctggaggagccttctcaagaacagagcttctcggacaaactatttagtggaaaaggcttacattttcagccatcagttttagattttggaatacagttcctgggacatcctgtagcaaagattctccatgcttacaaccctagtagggacagcgaggttgtggtgaattcagtgtttgcagctgctggacatttccatgtaccgccagttccctgcagggtaattccagcaatggggaaaacttccttcagaattattttcttacctactgaagaaggaagcattgaaagttccttatttattaatacctcttcgtatggagtcctttcctatcatgtatctggaattggcactcgtagaatctctacagaagggtctgcaaagcagctaccaaatgcttattttctgcttccaaaggtccagagcattcagctgtctcaaatgcaggcagaaaccactaatactagcctcttgcaggtgcaactggaatgcagtttacataataaagtgtgtcagcaattaaagggttgttatctggaatctgatgatgttttgcgtctacaaatgagcataatggtaacaatggaaaacttttcaaaagaatttgaagaaaacacacaacatttgttagatcatctctctattgtttacgtagctacagatgaatctgagacctcagatgattcagcagtaaatatgtatatattacattcaggaaacagccttatatggatacaggatatacgccatttctcacagagagatgctctgtctctgcagtttgaaccagtactactacctacttctacaacaaactttacaaaaattgcttcttttacctgcaaagcagctacatcatgtgacagtggaattatagaagatgtgaagaaaacaacacacactccaacactaaaagcatgcctcttctcttctgtggctcaggggtattttagaatggactcttctgcaacccagtttcacatagagactcatgagaacacatcaggactttggtcaatatggtaccgcaaccattttgaccgtagtgttgtattaaatgatgtgtttctttccaaggagaccaagcacatgttaaagattctgaatttcactggccctttatttctacctccaggctgttggaatatattttctttgaaacttgctgttaaagacattgccataaatctattcaccaatgtatttttgactacaaacataggtgccatttttgcaatacctctacagatttattcagcaccaaccaaggaagggagtctgggttttgaagtgatagcacattgtggcatgcattatttcatgggaaaatcaaaagcaggaaatcctaattggaatgggagcctttctctggatcaatctacctggaatgtggattctgaacttgcaaataaattgtatgaaagatggaagaaatataaaaatggtgacgtctgcaagaggaatgttttgggaacaactcgatttgctcacttgaagaaatccaaggagtcagagtcctttgttttctttttgcctcgtttgatcgcagagcctggcctcatgttaaacttcagcgcaactgcccttaggagcaggatgatcaagtactttgtggtgcagaacccgtcctcttggccggtctccttgcagctcctgcctctctccttgtaccctaaacccgaagccctagtgcacctgctccacagatggtttggcactgatatgcagatgattaatttcacaactggtgaattccagctcaccgaagcttgcccttacctgggtacgcattctgaggaatccaggtttggcatcctccacttacatctgcagcctttggaaatgaaaagggttggcgtagttttcacacctgctgactatggaaaagttacctcactcatactaatccggaataacttgactgttattgacatgattggcgtggaaggatttggagcaagagagttattaaaagtgggtggaagacttcctggtgcaggaggctcactccgatttaaggtgcccgagtccacgctgatggactgccgtagacaactgaaagacagtaagcaaattttatctattacaaagaactttaaagttgagaatattggacctcttcctataactgtttcgtctctgaaaattaatgggtataactgccaaggttatggattcgaggtgctggattgtcatcagttttccctggacccaaacacatcccgcgatatcagcattgtgttcactccagactttacctcctcctgggtaattcgggacctaagtcttgtaaccgcagcggacctagaatttcgcttcactctcaatgtgactctccctcatcacctgttgcccttgtgtgcagacgtggttccaggacccagctgggaggagtcattttggaggctcacggtcttctttgtcagtttgtccctgttgggtgtgattttaatagccttccaacaagcacagtacattctcatggaattcatgaaaacaagacagaggcaaaatgctagctcctcttcacagcaaaacaatggtcctatggatgtaatcagcccccattcttacaaaagcaattgcaagaactttctcgatacatatggcccctctgataaaggcagggggaagaactgccttccagtgaacactccccaaagcaggatccagaatgctgcaaagaggagcccagccacctatggtcattctcagaagaagcacaaatgctcagtgtattacagtaaacacaaaaccagcacagctgcggccagcagcaccagcacgactactgaggaaaaacagacttcacccctgggcagctcactgcctgctgctaaagaggacatttgcactgatgccatgcgtgagaactggatcagcctcagatatgcaagtggcataaatgtcaacctgcagaagaatttaacccttcccaaaaacttactgaataaagaagaaaacacactgaaaaacacaattgttttcagtaatccttcttcagaatgtagtatgaaggagggaatacagacatgtatgtttcctaaggaaactgacattaaaacttcagagaacacagccgagttcaaggaacgggagctctgtccactgaagacctccaagaaactacctgaaaaccatttaccaagaaactcacctcagtaccaccagccagacttgccagaaatttccaggaaaaataatgggaataaccagcaagtacctgtcaagaatgaagtagatcattgtgaaaatttgaagaaggtggacacaaagccttcttcagaaaagaagattcacaaaacatctagagaagacatgttttctgagaaacaggacatacctttcgtagagcaagaagatccttataggaagaaaaagcttcaggagaaaagagaaggaaatttacaaaatttaaattggagtaaaagtcgaacatgtagaaagaacaagaaaaggggtgttgctccagtctcaaggcctcctgaacagagtgatctaaagcttgtgtgcagtgactttgagaggtctgagctgagcagtgacatcaatgtaagaagctggtgtatacaggaaagcactagggaggtttgtaaagcagatgccgaaattgcaagcagtttacctgctgcccagagagaggcagaaggttactaccagaagcctgagaagaaatgtgtggacaagttctgctccgattccagctctgactgtgggagctcctctggcagcgtgcgtgccagccggggcagctgggggagctggagcagcaccagcagctccgacggggataagaagcccatggtggacgcccagcacttcctgccggccggagacagtgtttcacaaaatgattttccttctgaagctcccatctccttgaatctttctcataacatctgcaatcccatgaccgtgaatagtctcccacaatacgcagagccttcctgtcccagccttcctgccgggcccacaggtgttgaagaagataaaggtctttactcacctggagacctgtggcccactccgccagtgtgtgtgacaagcagcttaaactgcaccctggagaacggcgtgccttgtgtgattcaggagtcggccccggttcataatagtttcattgattggagtgcaacatgcgaaggccagttttccagcgcatactgtccattggaattgaacgattacaatgcctttccagaagaaaacatgaactatgccaatggcttcccctgtcctgcagatgttcagacagactttattgatcacaactctcagtctacctggaacaccccacccaacatgcctgctgcctggggacatgccagtttcatcagctctccgccctacctcacaagcacccgaagcttgtctccaatgtctggactttttggttccatctgggccccgcaaagcgatgtgtatgaaaattgctgccccatcaaccccaccacggaacattcgacccacatggaaaaccaagcggtcgtgtgcaaggaatactacccggggttcaacccgtttcgcgcctatatgaacctggacatatggactaccacagcgaataggaatgcaaatttcccactgtctagagactcgagttactgtgggaatgtgtgaaaataattggatttttaaacaatgtgaataaagaggcttgtgttttgattactagtgtaaactggttattgagatagattatgacattggtggatattttggcacttttatatgaaaataaattttttaatgaaaaaaaaaaaaaaaaa

SEQ ID NO: 376 - DNA, 7046 bp, Homo sapiens
gtcggttgttgtcaagatggcggctgcagggttgctgccgccccatctgctattgcccggcgaggtcgccgctgcctcagctgccatcgccgctacaggcaccagtgccgctgcgcgggagctagggctgtcgaggccaacccttccgcgcccgtgacgcggggcctgagagacggagtgtagggaggggccgagcaggaggaggaggaagccggagctgccatgagggaggttctgggggcgagcagacaggcggcgctgaagtgaaggatgctggcggggaggcccggaacccggagcgcggtcggggaactgggcactgaatcatcggacaacctcgacagagcccccctcggccctcgggagagcggcgggcatcaccgacctggctcttacctagatatgaaaatccatctggagaaaaatttagaagaagagcgccagatattactgcagcaacaaaaaatatgtcgaaatcgagcacgtaaatattttgtggagtcaaatcggagaaaaaaagcttttgaggagaaacgaaaagaacaggaagaaaaagaacaccaaattagagaacaaatacttcaacaaagaaaacagaagtttgaagaagttactgaaaaattccagcgtgcccatgttcctctttcacagcggaggaaagcagtttcccgaaaaccagttcctccattagaagaggccctcaaacaaattcaggaatccaacttaaaatcagaagtaaaccttcccttttcccgtagaccaacaataaactggagagctatagattctgccttgccttccgcattatcaaaaaatgatcacaagcatcagaaacaactcttatccaaaatcaattgtgagaaagaaatgaatgaaaacatgagggcaaccttggctactagcaaaaatgtgttccagcttaaactggaggaaactcagaaactcctcgaagatcaacatctaagcaatttgcaaaaattttgtgatgaagttaatcagataaccaattctgaaaccctctcaagtatagacagtcttgaggctacagagcatgaagaaatatatttaacacttaataaggagcattccacatccatccagcggaataccatttccctcaaaccagcaaatatgcaatcaactaatctcagctgctttgatgaagataaactggcattctctaaaactcaacatataaataattggcttacaaatttagatgcttcaaatactcagaatgtcacagctttctcagatattttaagtaaatctaatgttctgccttcatgggaatattttaatagtaaagaacaaaatccatctcctttgaatggaacagtggaaagagccacaaatactgctaataattcagtaccctttgtatctagcccacccatgtttgtactagataaaaaatgtgaaaagacctctgaaactagcactatgaggacaactgactccacttctggagcattcaaaagagagagaccattagttactgagagcccaacatttaaatttagcaaatcccaaagcacttcagattctctaacccaggaagtggctacatttccagaccaagagaaatattctgaattaaatcaagaaaatggaactacttcaattcctacttcatgtgtaccagtggcaacgcctttagttttgccatctaatatacagtcagctagaccttcagcaaagaacagtatacacataaaagaaattgatgcagtgcagtgttctgataagttagatgaattgaaagatggtaaagaagaagagataaaatattttaattgcaataaggaagagttgcctttattttcagacagttttcaagatgcctatatacctcacaatcctgattcaaaagatgaaaaacaaaaattagctgaaacatcatccttgtctaatgtaacttctaattatgactttgttggccagcataagaaaatgaaatacaacatccatgagagaaatggtgtgagatttcttaaaagtattttaaagaaagaatctaaatatgaacatggttatcttaaggcattaattataaatcagagctttaagtttggaaatcaaaaagcagcagctatcagagatagtattgaattaacaaaggaaaaaggtgcagaaattccaaagaccattaaaaaactgaggtggtttgatgaaactagcaatatagaaaacaatgctgaaaacagtcattcactgaagaataaaacaggaacaactcaacagcattctcaacaattccacattcaaagtggtgctggaagcaacataattagtgtttctacttgtgctgtaaattctgctgatacaaagaagtccagggaggattctatctctgaaaatgttacgactttaggaggatctggagcagaccatatgcctttgaactgttttataccttcaggttataactttgctaaacatgcctggccagcctcaaaaaaagaagaaagtaaaatccctgtacatgatgattctaaaactaagcaaggtaagccacaaagaggtagagcaaaaataattagaaaaccaggatctgcaaaagtccaatcaggctttatatgtacaaacagaaaaggcgctgtcattcaaccacagtctgcaagcaaagtcaacatatttacacaagctcagggaaaattaattataccttgtcctcctcctcaatctacatcaaatattagaagtggtaaaaatatacaagtgtctcagtgtcaaccagtaactcctgaaaatcctcaaaacattattacacataactcttttaattcaaaacatgtgcttccaacagaacacagtttgaatcagtggaatcaggaaagtagttctccactctcaaatgcttgttctgacctagtcactgtgataccatcactgccatcatattgttcttcagagtgccaaactttcgcaaaaataaatcattcaaatggcactcaagcagttgcccggcaagatgcgacattatattgcacccaaagaagtcctgtttgtgaagaaagttatccgtctgtgactctaagaactgctgaagaagaatcagttcccttatggaaaagaggtcctaatgtcctgcatcaaaataagagggctacagggtctactgttatgagaagaaaacgaattgctgaaactaagcggagaaatattttagagcagaaaagacaaaaccctggatctgtaggacagaagtacagtgagcaaattaataattttggacaaagtgtcctgctaagttcaagtgagccaaaacaaactacaaggggtacttcttatattgaagaagtttcagatagtacttctgagtttttgatggctgaaaacttagtgaaagcatcagtgccggaggatgagattctgactgtcttgaatagcaaacagatacagaaatcaaatctacctttaaataaaactcaacaattcaacatctgcacactgtcagctgaagaacagaagatcctagagtcccttaatgatctcagtgaaagactacattatatacaagaatccatttgcaaaaacccatccatcaaaaatactttacaaataataccacttctggagaagagagaagatagaaccagcagctgcagagacaagagataattccagcagaatccgtctaagaagacctttcatgtacttccctaggactagatgcataccgttttgtgaaaaccagccataggaaaacatgtgagcaacaacccccatgaacatttgtcctaactcagattttgtgagcagtgaagtttaacagagcagtgacatttaacaaagcagtgaagtttaacagagttctgagaataccatgaaagacattatgcctgcctaaacaaaaagcaggacataacctagctctgaatacatgccacaaggatgaagcttgtgagtagagcaaacaaacgtttttccaaagaattcacagtgctcctttgcaatttatagatttcatgttgaaatatatgttaaataaaatttctgtttattgaacctctttattaaacctctaacttactgataagatgtttatgaagtatggcatattttgatttttttaattgtaataaatattcttaaagttaccacatcccacaaaatggcccttggtggcagcaatagagcaaaggttacctttttgtatggtgaagggaggccttcctatggctgtacaattacatcgattcttccaaatttcatatttcatacatggcactttggcataccgaaaaaacatgaaatttttcattaaaatgccatgaatcaagccagggccgttggcttatgcctgtaatcccagcactttgcaggccgaggtagacagatggcttgagctcaggagttcgtgaccagcctgggcaaccctgtctctacaaaaaatacaaaaattaaccaggcatggtggcatgcacctgtagtcccagctacttggggtgctgaggcgggaggattacttgagcccaggaggattacttcaacctgggaggttgaggctgcagtgagctgtgtttcgccactgcacaccagcctgggtgacagtgtgagacccagcctcaaaaaaaaaaaaaaaaaagtgatgaatcaaaattagaaattaagagttttaagaaaacatgtggccttttattaataacactactaaattttggttcctccatagaattagttttgaaacacttgatgtagtgagaaatgcattaacatgttgaatgcctaccatgtaccaaattttgtgcatatattttttatttaatctgaccagccacccaaaccatgggtatttttgtctccactttagagatgagaaactgagccaaggccacatagctacctacagtgacagaatcaaaattcaaactcaggtttatctagttccaaaacccatgttctttctgccacaccatgttagtagaaatggaaactattggatgaaatgaggaaaaacaggaaaagaattcactttttaaatgaagaaattagtgaaaaaattgacctaatgaaggaaacatttgtgctttcctatatttttaattttaagaataggatttcggaaggcgacagaaaatttagttcttagacatttaaatagaaagttgtgtgcccctatagaaaatatttgagaatttcttatactatcaagaaaaaattctgtgaattaagatgtaatttataaaataacatttcaatgggggtaaacaggccagaagagtgtgccaagttgtttgtgaatcattccaagcacctcagatgaaaactcacttttattaaaaaaaaaaaagacaagggtttatattcatatacactagtatatatgtacacagcagcatcctgcatgccaaagtagcttcaccgttagtaatccctcactttaatacctcttaggaaccaaagaatgcctctacaagcaaaaagatagttgaaaatagttaagatccaaagtcagaataggccaaaaaaaaaaaaaaaaaaagcctaaatagtaagctggtgaaacaagataagatttgcattttactagaacttgcacattatgatattgtccttttatgaaactgtcatatgaccagaattcttctgtaattctgcccatgactcctccagaattttagtagatacagggtgggttcattaagagtgataaaagtgggaagacataaagagcctttgtgaattaaagtggaagagaataacactttgcatgctataaacgtgaaaactaacatttttggccagacacagtggctcatgcatgtaattctagcactttggaggccaaggcaggaggactgcttgagcccaggagtttgagaccagcctgggcaatgtagcaagaccccatctctatataaaatataaaaatgttggctgtgcacggtagcttatgcctgtaatctcagcactttgggaggccaaggcaggcagatcatgaggtcaagagatcaagaccatcctggccaacatggtgaaaccctgtctctactaaaaatacaaaaatagctgggcatggtggcacgcacctctactcccagctactaggaggctgaggcaggagaatcgtttgaacccaggaggtagaggttgcagtgagctgagattgcaccactgcaccagcctggcaacagagcaagactccgtctcacaaaaatgaataaataaaataaaaataaaaatgttactttttaaaaagtaacttttttaataatataagaaagaaaaatgccctttcacactgaatcttcaagttctaaggaagaaaagagtctcctttcgaatgtgaagaagtaaatttagaggaaatcaaacaagcatcactttcctcagtggaaaaacttatgaaacttcttataagagagagtaatctcaggccggacatgctggctcatacctgtaatcccagaactttgggaggccgaggcaggtggatcatttgagctcaggaattcaagaccagcctgggtaatatggcaagagcccaactctactaaaaatacaaaaagaaaagaaaacagccaagcttggtggtatgtgcctgtggtcccagctactggggaggctgaggtgggaggatcgtttgagcctgggaggcagaggttgcagtgatcaggaattgtgccactgcactccaacctgagtgacagagcaacactctgtcttaaaagaaaaaaaaaaaagagagagatagtaatctcttgggcaaaaggtatcaaataattgaaagaaaagtttaaacacatttccgagaggcagggcaactaataactggtcagaaaaatttagacggtcttcattttaaaattggcatcaggaaggattaccatgaacttattttaaatccatattgtaccagaatgactatgtctgtgtttcttaggaatgttgaagctttttgtgaaaactgtactgtatacatatataaatatacacacacttacatgtatgtattttgatagatattacatggactaaattttgtcaatttcatgtaatttaccctttgcaataaaaatgattcattaaatatataacta

SEQ ID NO: 377 - DNA, 4679 bp, Homo sapiens
gagccaggcgggggcggagggggaggctggcagcggagctttgaatagggaagttttgcaggggttacgtttgcagtcagtccggtgtttgcaaatattgtgtgggctccgcgcgctgcgggctgcgggagggtccggccgggcgtctctgcgagcctggagtttgcatgaaactttcacctgcgctccggggagactttcggctccggctcccaccgcgcgcctcgccgccctcgcgaccgcgggctccgtccaacccggcccgacatggacgtgctccccatgtgcagcatcttccaggagctccagatcgtgcacgagaccggctacttctcggcgctgccgtctctggaggagtactggcaacagacctgcctagagctggaacgttacctccagagcgagccctgctatgtttcagcctcagaaatcaaatttgacagccaggaagatctgtggaccaaaatcattctggctcgggagaaaaaggaggaatccgaactgaagatatcttccagtcctccagaggacactctcatcagcccgagcttttgttacaacttagagaccaacagcctgaactcagatgtcagcagcgaatcctctgacagctccgaggaactttctcccacggccaagtttacctccgaccccattggcgaagttttggtcagctcgggaaaattgagctcctctgtcacctccacgcctccatcttctccggaactgagcagggaaccttctcaactgtggggttgcgtgcccggggagctgccctcgccagggaaggtgcgcagcgggacttcggggaagccaggtgacaagggaaatggcgatgcctcccccgacggcaggaggagggtgcaccggtgccactttaacggctgcaggaaagtttacaccaaaagctcccacttgaaagcacaccagcggacgcacacaggagaaaagccttacagatgctcatgggaagggtgtgagtggcgttttgcaagaagtgatgagttaaccaggcacttccgaaagcacaccggggccaagccttttaaatgctcccactgtgacaggtgtttttccaggtctgaccacctggccctgcacatgaagaggcacctctgagggagcagagaggtggatcctgtaggctaaaaggcttccaggctgagagccggccgtggaaggagggatgcgtgttccagccaaagcatgccgttctgcaccctacccagttgcctccagggcctctccttggaaggtcttttgagggctaaaaaggtcctgtaagaagcggcatagcacccgtggtgcatggtatgtgggtgaccctggactcgccactggtacccgcccttccgagcggcgcctaagcctttgccgtgagcatgcacactgagaatgctaatggttgggttgattgtatgttgaggatctattactgaccgtatgatgaggccaactttttttccttgtggttagcaagactgcaagagatggaaaaaaagtagtttgaatgttttgtgtgtaaggagtataccatgagatgagatgaccaccaatcatttccttggggggagggggtgtctgcaccttagaaaaaaaaagaaaaatcaaaaaaacaaaaaaacaaaaacaaaaaaagaaggaaaatcttggagggtgggcgtgggaactcaggaccccagagtggcgagtggtgtggggagggagagcctctctcccccttttctgtgtgagaggaactcttagtgtctggtgcagctattaaatgtgcaatgtgtcaagtagcttgttttacacgctacaacatagctcatttgtaacccattgtataagctgtgtatttacaaatataacacaacaatttaacttttccttagaatacaaaaagtcatgcatggtctggggaactatatgcttttccatttttaagtcaggactgcaatactgattccagttaatgagcagctaagatccaatctgtctaatacagtgaccccctagccatccgggcctggcaatatacaattttttttcccctccaagtttgtaacactccccttccagaaaggcattgtgcaacacaggattatttttaaatgattctgaatttgaattaactttttggagaattctgtgatgcccttagaagaaattggacacgtattgagtgtcacaaagctggggctgggaattgctggtctaatgtttcattagacttaagaacctaaaatttttctcagttgggtggataaaaccactaacgcttagaaactgttttctcatgcagctatgtttctcttatttatgccttgaggactaatttctggttttctagctgttaatgcactgttgaccttcataatggtgccttacgcaagcgatcccttctgtgggggtctcatacaggggtgtgggcgatgcatgctttattaaggctcttgtttcacctggcagtgtactgtatcaacgtataatacagaaaaaaaatctctttaaggtcctccttcacaaagacatagagtgaaactccctttacatgtcagtatttgttcaacactttaggcaacttgactgtcagtgttaaaatggaaaacaggaaaatggaaaaatctgaccaattctgccaccttgagactttcatatagaccttgcacaacaattgtatagatcacacaccggctgtatttaatatgtaacattttcacacatattaaagatacagaagtattaaaaaacccccaatgttaatgtatttgcttaaaaggcacaagtttcacatatctgtctagctatctgttggtaatacagaaagtatactacttttttaaaaaagtgggcagaattcttgtgtatgtatatttgtgtgtacagtatgtgtatgtgtgtatatatatatattatatatatagataatatataaatattttttttaaggagaaactagaatgtttagctagaaaattccacagcctgtgaagaaatatttcaaaatggccataaaggaggtaaaaatgaaaaccataacctaacttttatagaggctttatctttaatttaacgatgtgcggaggactttcttgcttgaatctgttccgggctgtctgctctgtccatcaaatgggcaggtctggaatggggcaccttcggccgttcagaagtggcctgaacagaatgctggaacccaggctggactcggacacactaaggttttgattttgaatttcagccttattagaagatctaacctaagagtaagctaaccacagggattcttttgtagaacactttttatgcagatgaagctattttttccagcaagtagattcttccagtttttccaaggagtaatttccccgaattggcataccacggcgtggacagctgatatttcacccagctgctggcttgtgggtgtggctctttgctttatatatatatacacacatgtgagtctggctgggctggtattttgtttgatcttcctggaaatgagcagtgactaacgctcacataactggttttttttttatctgggctgatgaatacatttacctaagaaactcatttcgttttacttaagaggggaagtgcagttttcttttggcagttcagaatccaagcacttgatttgctgggtttggaaaactccttttttggccttctatgtgcttagccataacaattccattaagcaagaaggtaagcaaaagacaaaaaaaaaaaaaggaaaaaaaaaaacttgcactggcttgtctcacttacgaaacatgtcggagctgtttgcctgggtggggctgggtaccgtacctgtcaatgcctgtgattttcataattagcacgtacataaagaagtacattctgttcaggtgataactgagcctcaatcaagcagaaactttttgcttgaaattaaaaaaaaatttctattagtgaaatttcttttttttttttttttggaagcaccctgttatctaaagaatctttgtaagatttttgtaaaattttgttttacaagattttatttgaaattgttttttgcaagattgttatatttctgtatgaatgtattttttattggaataacataaaagaattcttatcagcatcttgagtctggttgttttttttgggggaagggggttgttggaacagattcctcctgcattcatcaccctggcttcctcctgggggcaaatcttcattgagcaaccctgagaacaactcaccgacctcagccccttcctctttccacagcctgtcctgggagctggagaggatgtcagcgagcctgacattgccctccctgaatgcatcaaatactcttctccaaggactgacaaaaacaaccccccggctgtgggcacagtagggaaccatgccggtttgatcttccattgctcaagccagggaatgcattgcagaggcacctgcacaacgacaaacttgagtgtttccctgccacttctgtgcctccacagcctgctccagttccgcagctagagctgggcctaccttccccagccagccctgccacacacctggctgaggcatgtctgggaggggtggaggaggcagagggactccaggccagagggctgttctcacaacctcagcccactctcagtcaaggagggcagaaaataaaagatgacatcactgccaaaaaaaaaaaaaaaaaa

SEQ ID NO: 378 - DNA, 1077 bp, Homo sapiens
ctcactctcctggaaacccaccgagaacctccaccctctgacaccatggtcaactcctgttgtggctctgtgtgctctgaccagggctgtggcctggagaactgctgccgccccagctgctgccagaccacctgctgcaggaccacctgctgccgccccagctgctgtgtgtccagctgctgcaggccccagtgctgccagtctgtgtgctgtcagcccacctgctgccgccccagctgctgtcagaccacctgctgtaggaccacctgctgccgccccagctgctgtgtgtccagctgctgcagaccccagtgctgccagtctgtgtgctgccagcccacctgctgccgccccagctgctgtcagaccacctgctgcaggaccacttgctgccgccccagctgctgtgtgtccagctgctgcagaccccagtgctgccagtctgtgtgctgccagcccacctgctgccgccccagctgctgcatctccagcagctgctgcccctcttgctgtgaatccagctgctgccgcccctgctgctgcctgcgtccagtctgtggccgagtctcctgccacaccacttgctatcgcccaacctgtgtcatctccacctgcccccgccccttgtgctgtgcctcctcttgctgctaaatctctgctgtgaacacaccacttccttattacgtcctttcctacagatgaaggctctcattgcaaacatgcggactgttcaagagaattgatctgggtcccataagcaaacctcatccttagaaattctgtatttgcattctaccttttgtccaaactcccttccttccaaaggaattcattgacaatctcctaataaattgacaaattgtcctccaacatcctcccacctctttgacttcaggacatttattcatcatgcctaaggaatttgaagattgcctccatcatttgtagggccacagatcttaaagcctccaaccttgaagtccagtgaagtctctctcttaaagtcttttgcaaacatttttgtaccttgttatttccatgtaccaaaataaacctctattctattggcactgaaaa

SEQ ID NO: 379 - DNA, 1976 bp, Homo sapiens
cttccctccgccccgcgccgcggctggcagggtgtgcgtgagtttggtggcggccggctgtgcagagacgccatgtaccggctcatgtcagcagtgactgcccgggctgccgcccccgggggcttggcctcaagctgcggacgacgcggggtccatcagcgcgccgggctgccgcctctcggccacggctgggtcgggggcctcgggctggggctggggctggcgctcggggtgaagctggcaggtgggctgaggggcgcggccccggcgcagtcccccgcggcccccgaccctgaggcgtcgcctctggccgagccgccacaggagcagtccctcgccccgtggtctccgcagaccccggcgccgccctgctccaggtgcttcgccagagccatcgagagcagccgcgacctgctgcacaggatcaaggatgaggtgggcgcaccgggcatagtggttggagtttctgtagatggaaaagaagtctggtcagaaggtttaggttatgctgatgttgagaaccgtgtaccatgtaaaccagagacagttatgcgaattgctagcatcagcaaaagtctcaccatggttgctcttgccaaattgtgggaagcagggaaactggatcttgatattccagtacaacattatgttcccgaattcccagaaaaagaatatgaaggtgaaaaggtttctgtcacaacaagattactgatttcccatttaagtggaattcgtcattatgaaaaggacataaaaaaggtgaaagaagagaaagcttataaagccttgaagatgatgaaagagaatgttgcatttgagcaagaaaaagaaggcaaaagtaatgaaaagaatgattttactaaatttaaaacagagcaggagaatgaagccaaatgccggaattcaaaacctggcaagaaaaagaatgattttgaacaaggcgaattatatttgagagaaaagtttgaaaattcaattgaatccctaagattatttaaaaatgatcctttgttcttcaaacctggtagtcagtttttgtattcaacttttggctataccctactggcagccatagtagagagagcttcaggatgtaaatatttggactatatgcagaaaatattccatgacttggatatgctgacgactgtgcaggaagaaaacgagccagtgatttacaatagagcaagattttatgtttacaataaaaagaaacgtcttgtcaacacaccttacgtggataactcctataaatgggctggtggtggatttctgtctacagtgggtgaccttctgaaatttgggaatgcaatgctttatggttaccaagttgggctgtttaagaactcaaatgaaaatcttttacctggatacctcaaaccagaaacaatggttatgatgtggaccccagtccctaacacagagatgtcttgggataaagagggtaaatatgcaatggcgtggggtgttgtggaaaggaaacaaacgtatggttcgtgtagaaagcaacggcattatgcttcacatactggaggggcagtgggtgccagtagtgtcctgctggtccttcctgaagaactggatacagagactataaataacaaggttcccccaagaggaatcattgtttctatcatatgtaacatgcaatctgttggcctcaatagcaccgctttgaagattgcccttgaatttgataaagacagatcagactgataaccttaacaccataggtgcaaaatgagttgttctgaggtttttttgaaacattaaagttccaaaacatgacatttttaagaataaatttgaaatagagtataactgaatgcagagaattatgtacctctaattgcttaattttgtaatggtcttttattgtagaattggttctttatactcagggaagtaattatattgtttttactttttgaaaaaagtgttaactcttgaaataaaatattctgataaaatatgta

SEQ ID NO: 380 - DNA, 5558 bp, Homo sapiens
gcccgtggaatgccaacaatgtagcgaatgtcccacttgggtctgcgctttggaaccgcggcgtgagcgccccgggaagatggagcagtcgccgtccacgccaccgccgccgcccggggctcccccgtccctgcggggccagcagcagctccagccaccagtgcccggtctcccggcgcgagaggcccgggagccgccggccaggacgcccccgagggtgtagaccgcgcccctggagagagtgataatcttcaaaatgaagactttggaaaattttaggttctctataggaactacaaaaatggaaggaaagaacattttcaaaaggaaattattttgaaagtatgtttacaacaaactgatactattgacagtttttttttttaaataataaaacactttaagaagattgtatttatggtaaaaggaaactggactaacaatgaggccaaagacttttcctgccacgacttattctggaaatagccggcagcgactgcaagagattcgtgaggggttaaaacagccatccaagtcttcggttcaggggctacccgcaggaccaaacagtgacacttccctggatgccaaagtcctggggagcaaagatgccaccaggcagcagcagcagatgagagccaccccaaagttcggaccttatcagaaagccttgagggaaatcagatattccttgttgccttttgctaatgaatcgggcacctctgcagctgcagaagtgaaccggcaaatgctgcaggaactggtgaacgcaggatgcgaccaggagatggctggccgagctctcaagcagactggcagcaggagcatcgaggccgccctggagtacatcagcaagatgggctacctggacccgaggaatgagcagattgtgcgggtcattaagcagacctccccaggaaaggggctcatgccaaccccagtgacgcggaggcccagcttcgaaggaaccggcgattcgtttgcgtcctaccaccagctgagcggtaccccctacgagggcccaagcttcggcgctgacggccccacggcgctggaggagatgccgcggccgtacgtggactaccttttccccggagtcggcccccacgggcccggccaccagcaccagcacccacccaagggctacggtgccagcgtagaggcagcaggggcacacttcccgctgcagggcgcgcactacgggcggccgcacctgctggtgcctggggaacccctgggctacggagtgcagcgcagcccctccttccagagcaagacgccgccggagaccgggggttacgccagcctgcccacgaagggccagggaggaccgccaggcgccggcctcgctttcccaccccctgccgccgggctctacgtgccgcacccacaccacaagcaggccggtcccgcggcccaccagctgcatgtgctgggctcccgcagccaggtgttcgccagcgacagccccccgcagagcctgctcactccctcgcggaacagcctcaacgtggacctgtatgaattgggcagcacctccgtccagcagtggccggctgccaccctggcccgccgggactccctgcagaagccgggcctggaggcgccgccgcgcgcgcacgtggccttccggcctgactgcccagtgcccagcaggaccaactccttcaacagccaccagccgcggcccggtccgcctggcaaggccgagccctccctgcccgcccccaacaccgtgacggctgtcacggccgcgcacatcttgcacccggtgaagagcgtgcgtgtgctgaggccggagccgcagacggctgtggggccctcgcaccccgcctgggtgcccgcgcctgccccggcccccgcccccgcccccgccccggctgcggagggcttggacgccaaggaggagcatgccctggcgctgggcggcgcaggcgccttcccgctggacgtggagtacggaggcccagaccggaggtgcccgcctccgccctacccgaagcacctgctgctgcgcagcaagtcggagcagtacgacctggacagcctgtgcgcaggcatggagcagagcctccgtgcgggccccaacgagcccgagggcggcgacaagagccgcaaaagcgccaagggggacaaaggcggaaaggataaaaagcagattcagacctctcccgttcccgtccgcaaaaacagcagagacgaagagaagagagagtcacgcatcaagagctactcgccatacgcctttaagttcttcatggagcagcacgtggagaatgtcatcaaaacctaccagcagaaggttaaccggaggctgcagctggagcaagaaatggccaaagctggactctgtgaagctgagcaggagcagatgcggaagatcctctaccagaaagagtctaattacaacaggttaaagagggccaagatggacaagtctatgtttgtcaagatcaaaaccctggggatcggtgcctttggagaagtgtgccttgcttgtaaggtggacactcacgccctgtacgccatgaagaccctaaggaaaaaggatgtcctgaaccggaatcaggtggcccacgtcaaggccgagagggacatcctggccgaggcagacaatgagtgggtggtcaaactctactactccttccaagacaaagacagcctgtactttgtgatggactacatccctggtggggacatgatgagcctgctgatccggatggaggtcttccctgagcacctggcccggttctacatcgcagagctgactttggccattgagagtgtccacaagatgggcttcatccaccgagacatcaagcctgataacattttgatagatctggatggtcacattaaactcacagatttcggcctctgcactgggttcaggtggactcacaattccaaatattaccagaaagggagccatgtcagacaggacagcatggagcccagcgacctctgggatgatgtgtctaactgtcggtgtggggacaggctgaagaccctagagcagagggcgcggaagcagcaccagaggtgcctggcacattcactggtggggactccaaactacatcgcacccgaggtgctcctccgcaaagggtacactcaactctgtgactggtggagtgttggagtgattctcttcgagatgctggtggggcagccgccctttttggcacctactcccacagaaacccagctgaaggtgatcaactgggagaacacgctccacattccagcccaggtgaagctgagccctgaggccagggacctcatcaccaagctgtgctgctccgcagaccaccgcctggggcggaatggggccgatgacctgaaggcccaccccttcttcagcgccattgacttctccagtgacatccggaagcagccagccccctacgttcccaccatcagccaccccatggacacctcgaatttcgaccccgtagatgaagaaagcccttggaacgatgccagcgaaggtagcaccaaggcctgggacacactcacctcgcccaataacaagcatcctgagcacgcattttacgaattcaccttccgaaggttctttgatgacaatggctacccctttcgatgcccaaagccttcaggagcagaagcttcacaggctgagagctcagatttagaaagctctgatctggtggatcagactgaaggctgccagcctgtgtacgtgtagatgggggccaggcacccccaccactcgctgcctcccaggtcagggtcccggagccggtgccctcacaggccaatagggaagccgagggctgttttgttttaaattagtccgtcgattacttcacttgaaattctgctcttcaccaagaaaacccaaacaggacacttttgaaaacaggactcagcatcgctttcaataggcttttcaggaccttcactgcattaaaacaatatttttgaaaatttagtacagtttagaaagagcacttattttgtttatatccattttttcttactaaattatagggattaactttgacaaatcatgctgctgttattttctacatttgtattttatccatagcacttattcacatttaggaaaagacataaaaactgaagaacattgatgagaaatctctgtgcaataatgtaaaaaaaaaaaaagataacactctgctcaatgtcacggagaccattttatccacacaatggtttttgttttttattttttcccatgtttcaaaattgtgatataatgatataatgttaaaagctgctttttttggctttttgcatatctagtataataggaagtgtgagcaaggtgatgatgtggctgtgatttccgacgtctggtgtgtggagagtactgcatgagcagagttcttctattataaaattaccatatcttgccattcacagcaggtcctgtgaatacgtttttactgagtgtctttaaatgaggtgttctagacagtgtgctgataatgtattgtgcgggtgacctcttcgctatgattgtatctcttactgttttgttaaagaaatgcagatgtgtaactgagaagtgatttgtgtgtgtgtcttggttgtgattggattctttggggggggggaactgaaacatttgtcatatactgaacttatatacatcaaaagggattaatacagcgatgccaaaaagtttaatcacggacacatgtccgtttctgtagtccgtatgctctttcattcttggtagagctggtatgtggaatgccatacctctgaccctactacttacctttttactgacagactgcccacactgaaagcttcagtgaatgttcttagtcctgttttcttctgttactgtcaggaaactgagtgatctaatggttctctcactttttttttgttcttttagtgtactttgaagtatcaaatcttaacttggtttaaacaatacatattcctaacctttgtaaaaaagcaaagattcttcaaaatgacattgaaataaaaagtaagccatacgtattttcttagaagtatagatgtatgtgcgtgtatacacacacacacacacacacagagataaacacaatattccttatttcaaattagtatgattcctatttaaagtgatttatatttgagtaaaaagttcaattcttttttgctttttaaaaaatctgatgcttcataattttcattatattattccacatatttttccttgaagttcttagcataatgtatccattacttagtatatatctaggcaacaacacttagaagtttatcagtgtttaaactaaaaaaataaagattcctgtgtactggtttacatttgtgtgagtggcatactcaagtctgctgtgcctgtcgtcgtgactgtcagtattctcgctattttatagtcgtgccatgttgttactcacagcgctctgacatactttcatgtggtaggttctttctcaggaactcagtttaactattatttattgatatatcattacctttgaaaagcttctactggcacaatttattattaaaattttgaatccaaaaaaaaaaaaaaaaaa

SEQ ID NO: 381 - DNA, 1764 bp, Homo sapiens
gcttgtcataaatggagcgacgtaatttcgacctgtcctttcccgggagttagcgatccctcaacccctgcactgcgctagtcctaaagaggaaatgtctctacgctgcggggatgcagcccgcaccctggggccccgggtatttgggagatatttttgcagcccagtcagaccgttaagctccttgccagataaaaaaaaggaactcctacagaatggaccagaccttcaagattttgtatctggtgatcttgcagacaggagcacctgggatgaatataaaggaaacctaaaacgccagaaaggagaaaggttaagactacctccatggctaaagacagagattcccatggggaaaaattacaataaactgaaaaatactttgcggaatttaaatctccatacagtatgtgaggaagctcgatgtcccaatattggagagtgttggggaggtggagaatatgccaccgccacagccacgatcatgttgatgggtgacacatgtacaagaggttgcagattttgttctgttaagactgcaagaaatcctcctccactggatgccagtgagccctacaatactgcaaaggcaattgcagaatggggtctggattatgttgtcctgacatctgtggatcgagatgatatgcctgatgggggagctgaacacattgcaaagaccgtatcatatttaaaggaaaggaatccaaaaatccttgtggagtgtcttactcctgattttcgaggtgatctcaaagcaatagaaaaagttgctctgtcaggattagatgtgtatgcacataatgtagaaacagtcccggaattacagagtaaggttcgtgatcctcgggccaattttgatcagtccctacgtgtactgaaacatgccaagaaggttcagcctgatgttatttctaaaacatctataatgttgggtttaggcgagaatgatgagcaagtatatgcaacaatgaaagcacttcgtgaggcagatgtagactgcttgactttaggacaatatatgcagccaacaaggcgtcaccttaaggttgaagaatatattactcctgaaaaattcaaatactgggaaaaagtaggaaatgaacttggatttcattatactgcaagtggccctttggtgcgttcttcatataaagcaggtgaatttttcctgaaaaatctagtggctaaaagaaaaacaaaagacctctaaaacttcaacaagaccttcaagatcacagaaatttttaaaatttgattccagttaataacagaggtggtgccagaatgcctggactgcagtggatgtgccccacctctttgcttaaaaaaaaaaatgtcaatagccaggcatagtggctcacgcctgtaatcccagcactttaggaggccaaggcgggtggatcacctgaggtcaggagttcgagaccagcctggccaacatggtgaaatcctgtctccactaaaaacacaaaaattagtcaggcgtggtagtgggtgcctgtaatcccagctactcgggaggctaaggcaggagaatcacttgaacctgggagggggaggttgcagtgagccaagatcgctccattgccctccagcctgggtgacaagagcaaaactccatctcaaataaataaaaaggaaaaaaaagtcaataaactgtacaaatttaattacagtaattcatttggcttttagtgtatcttctttgtcccaattaaacagttgcttgctgtgatgtaatcttaaaaaaaaaaaaaaaaa

SEQ ID NO: 382 - DNA, 6284 bp, Homo sapiens
acacacacacacacggcacctgggctaggcccggacacctgtctgcagcatggataagtatgacgacctgggcctggaggccagtaaattcatcgaggacctgaacatgtatgaggcctctaaggatgggctcttccgagtggacaagggtgcaggcaacaaccccgagtttgaggaaactcgcagggtgttcgccaccaagatggccaaaatccacctccagcagcagcagcagcagctcctgcaggaggagactctgcccagggggagtagaggccctgtcaatggagggggccgcctgggcccacaggcccgttgggaagttgtgggcagcaagctgactgtggatggtgctgccaagcctcctcttgctgcctcgacaggggcacctggggcagtcaccaccctcgctgctgggcagcccccgtacccaccgcaggagcagagatccaggccatacctgcatggcacgaggcatggcagccaggactgtggttccagggagagcctggcgacttctgagatgtctgctttccaccagccaggcccctgtgaggatccttcctgcctcactcatggagactattatgacaacctctccttggcaagcccaaagtggggtgacaaaccaggagtgtcccccagcatcggcctgagtgtagggagtgggtggcctagctccccggggagtgacccaccactgcccaaaccctgcggggaccatcccctaaatcaccgacagctctccctgagctccagcaggtcttctgagggtagcctcggtggtcagaatagtggcattggtggccgcagcagcgagaagccaacaggcctttggtccactgcctcctcccagcgggtgagccctggcctgccttccccaaacttggagaacggagcaccagctgtggggcctgttcagcccaggaccccttctgtgtcagcacccttggccctgagctgccccaggcaaggaggtcttccaagatcaaactcggggctggggggtgaggtttcaggtgtgatgtccaaacccaatgtggacccccaaccctggttccaggatgggcccaaatcttacctttccagttctgccccgtcatcctcgccagctggtctggacggttcacagcagggtgcggtccctgggctggggccgaagcctggctgcacagaccttggcactggtcccaagctcagccccaccagtcttgtccatccagtgatgtccaccctgcctgagttatcttgtaaagagggtcccctgggctggtcttctgatggtagcctgggatctgtgctcctggacagccccagctcccctagggtaaggctgccctgccagcccctcgtcccaggtcctgagctgagaccctctgctgctgagttgaaattagaagccctcacccaacgtctggagcgagagatggatgctcacccgaaggctgattactttggagcctgtgtgaaatgcagcaaaggggtgtttggggctggccaggcctgtcaggccatggggaacctctaccatgacacatgcttcacctgtgcagcttgcagccggaagctgagaggaaaagccttttattttgtcaacggcaaagtgttttgtgaagaagacttcctgtactctggtttccagcagtcggctgacaggtgttttctttgtggacatctgatcatggacatgatcctgcaagccctggggaagtcctaccaccccggctgtttccgctgtgtcatctgtaatgagtgtttggatggggtgcccttcaccgtggactcagagaacaagatctactgtgtccgagattaccacaaggtgctggcccccaagtgtgcagcctgtgggcttcccatccttccacctgagggctcagatgagaccatccgtgtcgtgtccatggacagagactaccacgtggagtgttaccactgcgaggactgtggtctggagctcaatgatgaagatggccaccgctgttatccgctggaggaccacctgttctgtcactcctgccacgtgaagaggctggagaagagaccctcatctacagcccttcaccagcaccacttctagccagagccacttgcagacatcacggcaggggatgaggagccggggttgctgctgctgcttccggtggcccctggggtggaagtggggtaggggaagaggaggggcaggagggagagttcctgtgagcatgtggggggtgcctttcctttaaccagggaggtgaacactacctgcctcctgcgtgtattttccaagtgcttttctctgttgccacattttcctcaggttactcaggaaaatgctccagcatgtgcgagcacatgacctgaggttgcatcatagcaccaaaggaatcctcctgtcccctctgggaacatttcatgcttcagagggagaggtttttattgagcttgtttcacaatatccccttgaagggacagctcagctgccaatacattcaaccctttctcttccttcaggaaaatacctatacccaaatgttccctcccccgacatatatcatggcatgatttaaggcttcttttcacctgagagcttcagttcttctgcagaatggctgcaaatttaattgcattaaggcaagaaggaagctctaatgtgtgctttgtatcctaagataaatttgcttagaaaaccagagtcaagatttgaaataggtgaggcagggtttcctccttagacactgacagcattctctgtaccccttcaaatccttactctcctaaaggcagctgagtccgcgacagaaatttgccctatgtgagtaaaacatactttgggagaagaacttggtgcaggcaccaggatttttttttttgcccacgtgtttgcgctgtttttctctggagttctcaagagttggtgacttggaaggccgcttctgcaaggcaagtctcaggaacccatgcaggtacatcgcttgcacctgtttttagcttatttaatgacgggcttttgggaagagctgcccgcatactgagagacagcttcttataaacaaggagagtttttgtgtgtgcgagatctctaagccagcgtgggagggagcgcctcaggataagttattatattcatttcgttggtttctctcctgcccaattcttggcacaggcattatgtttgaagaaaccaggataaggtacactgcttttgtctgtttaatttttttagttgtttcccttcactttcagtcttccacacacaaaaaatacctcacagagcttcaccaaatcacagattcaggaggaatttggctttcacactggactcagataccttcttcagtgtgttggaaatcactggcttcacacaggcccaactccagctggtcagggcagagtgatcgtaactaaaggtcagtggggaatagatccgattcagtgcttttgccttatgcatttcagcatcctggctccccagggtggcaggagctgagggagggccacacactggcaagatttcaagaccactctctgcactgaagaggtaaaatttgcactgcaagtcacatccctgaggccagaggtcagtaccctttggtatttcgattagaagaagctgcaaaagaaaggcagcccattttaccattgccagccaggccggggacacaggagccggtgtgtgcactctgcctcctcaccttgcacccagagcaagaggactgggtgctgggctgcagaggccggtcagtggagcccctagcacgtgtgaactcaggcttttcattgggcccggctccacttctaggccatgttttgactcatttggtaaccattgcctgtaagcagcacagaattggtgccatggattatcttttccatgttgatggaattcattctgttggaatcctttggccagatgtcacttcagccagggtgtgcatcatcattggttctttttcacaggctgagcctcctgaaaacccatgaacgctggggctggggaagtgaaccctgaggtggggaccctctcttcccatcaaatcatccagctcagtgtggggcgtggcaggggggtaaatgaagccagccaatgtgttaacctgtctctgtcaacctaagaatgttggccttactgacacacctttgctccatgttcaagaccagaagtagctgggatttgtttgcaaattgggtaattagtttaaaaatctgtgattacatttttaaatgaaattttcaaagtggcctagattgaggtgattcagataggtttgcgaatataccattttatattgttgagaaagaacaaaaagggaatttccagatgtcctagaaatcctagcaacagatttctctggttgtcagtttccctggagaaggcgccagataggaatctccaatcagttgtttttctcttcgcttcaggcccttacacaaaagccatgaagagatgttcacctacccggtattttaaatgttctgtaaattattagccaaatagaactgtaatggggttgtatttatgggcgcctagaaagaaaacacaaggacttggtaggccaggaagaaaagattttaaaatttagaatgaatagcccttctgggttttctttttgacaattcttggacttgaggtaaaacaaggaggattgtggccggatttcagatcccaaagccagcctccatcttaggcctttgcctcattgtgccttttaggttttcttacccaccgtctcctgttttgtcttttttttcttttctcctacccctatcttgggacattcagaaactgcctgggtggtttgagaagagacaacccagtttgatctgcaatacaaggatccattcgtaatctctctctcactgatgttattcccccatctgccgtcttggttcatctcaccacagaagggcatttagtcctacccagccatcggctgcgtatgacagcaggatggcacttcccatttctctgtggttagtgctcgagtgaaaacctctttcagctgagtcctctgaggttctgctgttgagtcctgggtggctgatggaatgattgaggaggtctggtcaccctcaagcgccgtcatcgccttgtttccatgggcttctgtcacacaaaatgaagaacagaaatgttaggacttaagagaatgtttggaattcacacctctttgcagtcctttcaaggctgctgctctgtgctgtgtcccatgcatgtgaaagtagagctgtgatggctgctgggacgcttgcaaagatcatgtgtgagaattgagcacaagaccacaaattattactgcttgatgcgcttgttaaaactctatctgccaggaaaccaaattttcttttcttttctttttttttttgagacagggcctcactctgttgcccaggctggagtgcagtggcgcgatctcagctcactgcagcctccacctactgggctcaagtgatcctcccacctcagcctcccgagtagccgggaccacaggcgtgtatgactggctacgcctggctaatttttgtatttttaatagagacgagtttcaccatgttgcccaggatggtctggaactcctgggctcaagtgatctgcccacttccgcctcccaaagtgttgggattatggccattagccactgtacctggcacaatttttttttgtaccctcctttatgccaagaatcagtcctaatttctttactatgtgaagtaacttttaaaggtaatagaaaaggccaggcacagtggctcatgcctgtaatcccaggcgccgtggctcacgcctgtaatcccagcactttgagaggctgaggcgggtggatcacttaaggtcaggagttagagaccagcctgaccaacatggtgaaacactgtctctactaaaaatacaaaattagctgggtttggtggcgcacgcctgtaatcccagctacctgagaggttgaggcaggagaatcgcttgaacctgggaggcagaggttgcagtgagccgagatggtgccattgcactccgacctgggcaacagagcgaaacactgtctcaaaaaaaaaaaaaaaagtaacagaaaaaagagtgaaatatattagctatcttttattctgagccaaaacttgacagatgtgggaaatcttcatatagtgtatgaaaatttcattgtacagggaaattattttcctctgtgtcttttcttttactataaagtgattcagaattttactgttactataaaattatgcaaagtattgtgacaaaactgcatcaatttgttgactattaaagtgctccttgaacatta

SEQ ID NO: 383 - DNA, 5223 bp, Homo sapiens
agccaccgcggcgacttggcggcgggtgccatgcgtctggagcttcacattctctgccccccacccaccgcgccggcgctcccttgtcacgcctcgggaagcgcgcacctgccaagcaggatgaataatctgatatcatgtgaaatgaggaaataagaagctttctgctgacttcattttgacccagggtccaaaaggtgatgtaatcctgtggcaagaagattcaaaactgtggactatcttgcaaaaaatacaagaagatattgaaagttttcatgagtgcctaccacctaatctcaaacactatcattcatatgtgcctcattgagcaaatctttaatgaggatctatatgccagataatgtaggcattgttcctaagtcatgcagaggggttgtgtaagcatggtcatttgcatcattatcctgcacgtctgatacagccaaactccacgccacctggtttgctcaacagcaaaagacacggccgggtgcggtggctcacccctttaatcccagcactttggaaggccgaggcgggcggatcatttgagcaatatcttttgcttgggagcagaaacagaaagtacatgatggacttcattgaaggatggagatttggaagacatgaatggatgaagaaccaagtgcgtgagggcacctatcaggattattgctgaaatccttatggagttaactggctgagaggaagtagagatggggtttcaccatgttgcccaggctggtctcaaactcctgagctcaggccatctgcccgcctcggcctcccaaagtgctaggattacagaaggtgcctgcttccccttcaccttccaccatgattgtaagtttcctgaggcctccccagacatgtggaactaacaggtttctcttattgcctggatccaagagcatctcctgggttcttcctgttagaatactgaatgtccatggagagtttaacataaggaagaagaggcctgtctcccagctgaaactggtgcagcagatcatgcaaagtaaaacctcagcagctgtgatgaagtagagcagagggcctgggtgtctgtcagctccaagcggaagatttccccagctttctaggtaactgtgcttccactgagcaagccagacacagacttgaatgtcatcacaatctgtgcctgtgacatctttccccaagaatagcacaaattgaacttttacattcttcataatatggaaggaaaggtattgactgagccacttctttatgcctcaagacatctcatatgtatttatatggatacatacatgaatgtatatattctgtcataataacatattctatttttcttattatagcacagtgttaggataggctacataggctgcattaaaccctcaaatagaagtttatattatgcatcagaagccagtgcagggactctcctcagcacaacatctctaagtggtgacttggaggttcaggctcctttcatcttaaaatgccatcatcttcagcatttggcctcaacagttgccagagagggagaagagagtatgtataagaccacactgcaggatctgtgttaggtctgcaagcactgctgtcacctctgccaaatcccgttagccagaacccaatcatatggccccatcctaactgcaagggaagcctgggaaaggtcttcttgtatgccaggaaaagaaaatgaaatcgacaagtatctagccagtctttgctacaagtttctacatgttggaattattatctatatttttcttctgatcatgcttagcatttgatactatgtagactgccttgttgagtcctgctgtattttgtgacatccacatgcagcatcccattcctcacaacaggactaggagtggtcagaagttttatcacccactttatggacggaaaccctgagacccagagcagttacatggcttgtccaaagttacatagtactgttaacttaaaaacacaatttataaatttagacaaagaaagaggagactttatttcttataaagggttatagccttcaaagtggctatctcacaggctgggaagctcagccttcagcagaagcccagagacaagcattttgaaggcagaggggttgggatggagctttatgctgaacaggttgactaaatatacatattcaacaggttacaggaggagctatgaatattcatgagggtggtcctgacacatgcgtattgaacaaacatacatgtaacacatgacccatgttcactttgggatggagacttaacatttcaatgtattacagttaggccctacacatcaaaaggtcatttcaggacacaaaagctcacaagtacacaatctctgtaaactagtcagaaccagtccatggttggtggtcttatcaggaaaaagttactaaaattagtctctcatccaatgaaagctgtagttatggctggtggaacaggggttcagttgggcagagtctatgagcaggatgatttgcaattgtttaaatattgcttatcttgaggccagtgcttgtttagctgctggagaaaaagaaaatccttgtggcagttagagcatagtttcttccttaggtgtaggagtacatgacttcccctcacctggcatggccttaggtcctgtttataattcggtatcttattgccacaaagaatctgttctgtgagtcatgtgatctctattggaacattaatgctgctcagttgttgtgtctaaaccataaaagagaaggagagtataattaggcatgtctgacctctcatcatagctgggaactaagtctttaaatttttttctggggtcctcttggccacaagggggtccatttagtcagtgggggccttgggatttatttttagtttacattgctaagtgacagagctttgcttctttcactctgaggttagtggtctctctgctgtgccacattgtcttccccagaagctcaaactggatgcccagccctcagtgtacaaactcaagtatgcaagaaatacatctttattcttttatgaatatacctaatttatatgttggaaggtgtcagcaatgaatttgatcactttggtatttctctacctttaaagatatgtttacatttggggtgggatgaaggtttggtggaggggaaggtggtcaggttgggccaaggtattgggaaatccatttgttcctcatgtcagctgtttgaggaggcaccaacccagatgtccacagttccttctggccttcctttaccgatactgatgcacctgtgcctccttcctgtgtgcatggcccatttgtgcccagcatctccctgctattttggggccactccagggtctgggaagttctgtaggcttataacatacagtcattcttctccccagcttgctgcctccctgagacacagaggtagagaagtaggaaaggacctaccgtacccaggcctttgccctctcacttttcatccatccttcttcccaccagtggagggatgtgtttctagtcttccagggaagctcctctctcctcaaaccattttcttccaaatactttggctttattccaaatcctctctagtcctctgagatttttttataacacaaaacacaacttacagaagttgtgttgttgttttgctgtttatcttgtcacattatttctctaccttgaggcaacaggacaagggcctgctgtccagcgcacggaggcagggaggaaggggtaggggaatactaagaaaaaaaaatttctcgatcacatgtgtaccacatttaactttatcaggtccttgtgaggtgagtatctgtgtgtcattgttctgaaactaacagtgaggggacaaagcattgataggagttcttacaatatatttgggaactcgcaggtgagggcctctcctgcctgattggtctttcaatgtaccatcccaacccacccacctcaatccccatggcttgatcctgctgtctcggtgatcaagctttcagttaagaattgggtgataatgagctagttaatccaatttaaaaaaaaagaattaggatctgggctcagaagccccacagctgtgaaagcctggccgtagattactagtcttctagatgtagaaaagatttttcctttctctggctatttaagtctttatcagtcaccctgcctcagttatcaacacacaccctagagtaaatctgttccctgggggtggaaatagaaggggcatgtcattgtacatccacactgatgaaaggaaaggaaacattaagatggcttaagtggaaaggtcacatacggcttgtactagagagacaccatgctaaagcaaaacatcgtttaaaaaaattctgacttatcatgtgctcagaaatgctcaaatgggtacaaccatcaccaagggtgggatgggagggcaggggaaaaaaatatgaagcatcaaaaaaaattctgatttgtatttgtgaaattcaatagtaaccctattcattaactggattttaaaatcatttcaaagcacattcggctttcaaaagatgtttgtttaaataatacagttggcttttggtcaaaaaatgaagtttcggtaatgcatagtaacaactgtagtgtaattactggccacaaaataccaggtgccagaccaacccttttcgaaccatttaagagaaccaagccaagcaaaaatgcccagcctagccttacccagaagttcaaaagctcagcctttgtcaccaggaaaaaattaattcaaagagcaaagccattattcggcacaaccaggtattctgttgtaaacatcttttgttaatacatgttgaaagctgaactttctcacgtttgagtgaaagagggctgcttaaagagagtttaaaccaagccaggttcaaggtttttttcttttctttctttttagatttctgacttcatatctgtgggatccacacaatggggaggtactggccttggaatccatggttccccagctatcattttactttagaattacagtgttctctgttagtgtcaagggaatgaacctgacgagaaaagaccaaacataggactgttacagggaagaaaaatatgaaaagacctaaagatgcacgtcctcattatatgtaaggaatctatttcctagaatcctataaaaagctcaagtgaatttgcttcagttaataaatgtgatttaattataatgataatgccacagaaaaaaaaaaaaaaaaa

SEQ ID NO: 384 - DNA, 2201 bp, Homo sapiens
aaaaaaaaaaaacgatgaagtatgttggtgcagggaagggaggagggtctagtgccgggccaccccactgtaaatccagggaggtgtttggtgaattcatggctgcaccctggaatctatttcactgtaaatccaggaaggtgtgatgtgagttcatggctgcaccctggaatcttgttcactgtaaatccagggaggtgtttggtgaattcatggctgcaccctggaatcttgttcactgtaaatccaggaaggtgtttggtgagttcatggctgcgccctggaatcttgttcgctgtaaatccaggaaggtgtgatgtgagttcatggctgcaccctggaatcttgttcactggaaatccaggaaggtgtttggtgaattcatggctgcaccctggaatcttgttcactgtaaatccaggaaggtgtgatgtgagttcatggctgcgccctggaatcttgttcgctgtaaatccagggaggtgtttggtgaattcatggctgcaccctggaatcttgttcactgtaaatccaggaaggtgtgatgtgagttcatggctgcaccctggaatcttgttcactgtaaatccagggaggtgtgtggtgaattcatggctgcgccctggaatcttgttcgctgtaaatccaggaaggtgtttggtgaattcatggctgcaccctggaatcttgttcactgtaaatccaggaaggtgtttggtgaattcatggctgcaccctggaatcttgttcactgtaaatccaggaaggtgtgatgtgagttcatggctgcaccctggaatcttgttcgctgtaaatccaggaaggtgtgatgtgagttcatggctgcaccctggaatcttgttcactgtaaatccagggaggtgtttggtgaattcatggctgcaccctggaatcttgttcactgtaaatccaggaaggtgtgatgtgagttcatggctgcgccctggaatcttgttcgctgtaaatccagggaggtgtttggtgaattcatggctgcaccctggaatcttgttcactgtaaatccagggaggtgtgtggtgaattcatggctgcgccctggaatcttgttcgctgtaaatccaggaaggtgtttggtgaattcatggctgcaccctggaatcttgttcactgtaaatccaggaaggtgtttggtgaattcatggctgcaccctggaatcttgttcactgtaaatccaggaaggtgtgatgtgagttcatggctgcaccctggaatcttgttcactgtaaatccaggaaggtgtgatgtgagttcatggctgcaccctggaatcttgttcgctggaaatccagggaggtgtttggtgaattcatggctgcaccctggaatcttgttcactgtaaatccaggaaggtgtgatgtgagttcatggctgcaccctggaatcttgttcactgtaaatccaggaaggtgtgatgtgagttcatggctgcaccctggaatcttgttcactgtaaatccaggaaggtgtgatgtgagttcatggctgcaccctggaatcttgttcactgtaaatccaggaaggtgtttggtgaattcatggctgcaccctggaatcttgttcgctgtaaatccaggaaggtgtgatgtgagttcatagctgcaccctggaatctatttcactggaaatccagggagatgtgatctgaattcatggctgcgccctggaatcttgttcactgtaaatccaggaaggtgtttggtgaattcatggctgcaccctggaatcttgttcactgtaaatccaggaaggtgtgatgtgagttcatggctgcaccctggaatcttgtttttaagggtcctgcaaagcccgctgggctgttgtgagatgaggcatgccgtccgtacctggttctgagtggtgaaagggtctgggtgatgtcttcgttaggggcttttgacctcagtggaattgatttttaacagagacattgcgtttggaagttgcccacggccctttttccttctttttaccaaaacatctattgggatagtttcctcttttaaaagtaatattgaggccaggtgcaatggctcacgcctgtaatcccagcgcttaaggagacagagatgggaagatagcttgagcccaggagtttgagacctgcctaggcaacatagcgaaaccctataatccacaaaaagggggagaaagagacc

SEQ ID NO: 385 - DNA, 2064 bp, Homo sapiens
ttcaaatgctggcacaacgcccagagctcgatgaggtgtgggcaagtagctgtctaaaggtggatgatgccctccatgcactttcagcctgcctggtggctgggcagtcgaaaacgtcgccgtctattaagctcctttgattgggagcaggtgacgggtagagacggaagttctgggaatcaccggagaagggagggaagggctccttccggccgcctgctcccggagtcttcgtggggaacgtgaggtgagagcaggcggtgaagagtagacacgactgatgacttcagggatgctacacctttctctcctgcctgggcaagcctcggtagtaagatttccgtagtccgttttgtatgtggttttgcagaaacataccccctctctgctccagcttcagtcgtcagtatccagctacttccaagagtcttgcccatgtcttgtgggatgttcagcaaatgtataaacacttaatatcccgacaaagcttggcctcttccctcccaaattacttcccaggctatgcacccgtttttgttaatacaaccaacttggaaactttgatgtcagatttgatgccctttcttgcctttccatgctccaatcacttgccaagtcctgtcgattgtacccctacagtaattcttgcatcttcttacccactgcccccacctaatcaacgttctcattaccatcccctgcacggtgtcagtgcagtacctttctcattgatgtcctgcctctagcatcactctgctactagcctatcttacatatacctgctataggtgtagccatcttcaagcaccaccgtgatccaaaatagctgatccaatggctctctgttgcctgtagattaaaggtcaagtttattaacttggattcaaaactttttttattttctgctgttccccttccattctccctcagtcagtggtaaaccagaccctgtgaagtacgtcatgcataaattattacatttttatagattgctcatgtcccttgcatgaaatacctgtctctccccctcatctccaaatgttgaaattctttccattatttaaagctttagaaagtgacatctctacctagaaataatttttctttctattgagagtccatcatatttctggaatttcatgtatttagttattaccactttctaacttcgaactaaaattatttacttgcaagtctttccccctattaaactgtaaacaggcctttatctaatgcatttctacattctggagtgtataacattgtgctttttttgtttgtttgtttgtttgtttctttgacacagggtctcattctgttgcccaggctggagtgcagtgacgtggtcatggcatgctgcggcctcgacttcctgggctcaggcgatcctctcggctcggcctccggagagctgggactgcaggtgcacaccaccaccctgctaattttttgtattttttgtagagatggagttttgcagtattgcccagtctggtctcgaactctgggctcgagcggtccacccacctcggcctcccaaagggctgggattacaggcctgagccgtggagcccagccccacattgtgctttttccatgacgttagcactgaataaatgtttgtggaatgaatgatagaactatgaatattccaagtaatgttttagaaacattaacctagcaaaagtatataggatagtatggatgagggaataggatagtcttggtgttgggtagtaaaggtaagaggtgtaacaaccaaggttacaataattgaataaaaggccgggtgcggtggctcacgcctgtaatcccagcactttgggaggtcgaggcgggtggatcatgaggtcaggagatcaagaccatcctggctaacacggtgaaaccctgtctctactaagtatacataaaattagttgggcgtggtggccggcgcctgtagtcctagctactcgggaggctgaggcaggagaatggcgtgaacccaggaggcggagcttgcagtgagcagagattgcgccactgcactccagcctgggtgacagagcaagactccgtctc

SEQ ID NO: 386 - DNA, 1808 bp, Homo sapiens
cactcattcattccaaagggtctctcaaggcaatggtaatgtgcaaggaggtgatacctaaatgaatgaccaaaagaacatgcttctgcttttgtgtgtctcctacattttagacatttgtttgtttctcttggtagcctttaaattccttgaagcccaggaccatgtctcacttacctttgtgtttccactaactagtctacctcctggaattggcagatactcagtgaaagcctgtgaaataagtgatgtctatttctagcatattattctgagatttaatgatagatttagtgattgaatgagatttccattttcaaatacagcaaaagcataactattttcattcattcatattcattcaacttcattctcaaaattaggtcctgagttaactaataattacctttgaaatgtgtgggttatttgaggcaatcaggtggtgacattgagctctcagccagagtttgtttctggaattgattcagttccattgcattgatttttgttctcagaagccaaggtttcccatgaaaaatcattcccacttgaattgggctgtgattcttgctgcgtttaagtaaaggaagcctcttggttctagttctgcaaacttacacactgaactgggacaagtttttgtttagagtaatggctgggaaaagaggaacctttcattttattcagaagtcaaaaacaaaggcctcccagccacctggagatgttttgttgcagacaccagcctggctctgtctttatgcctaacaattgagcatccagtcttctttgtgctgggaccattgctcagctctgcaaggggaaaagagggagaaagccagagctgccaggcttcttgcactggggccgggggagggttcctgggaagcaggtgctctctggcttcttggtacgtgaggctctcggagctgcctctcctctgaccctcaggtcctcaccgagtttgctccaggagtatattgaaaacatacccagtgctctctcaagcacccactgcttagagggcccagatttcttttccttctttcccttgcagagctggagactgcatcgggcatctggtgtttaaactaaacaggaaaactgactaaaggtccacagtgctcattgtgtagactagctgccctccgatgggtgctctgattatcagtggttccagtgcagggcctgtcactaaacaggcctcacttcctccttgggggctttcccatgggaggtgtggctttttactctacatggaaatgactctctgcagccacagaacacagtcattttctgaattatcccagtctctcatgcgccctggattcctccagatgccttatatctcttgtgcaaagttgtctaaaatttggttcccagcttccaagccttgccttttggccttcctggaagtatttttgttgatgagtcgtctgtcattattctctaaaatgatttgctttttgtttctttcattcctatttccaccccacatatacacacatgcttcttaacttaggggattacatgccaataaatctattgttgaaaatgcactaatactatcgcaaagacgaaaattcacaggctgaaccgttgtaagtccatatgctcctcaacttacatgtgtgatggagttatgcccaaataagtccatcgtcaagttgaaaaatcaaaatcaagccatcttaggttgaggaccatttgtttgtacctccaaagatgtcatatctttaaacatactccctagcttttctttttactttttattttgaagtaattatagaatcacagaaagttgcaaaaaa

SEQ ID NO: 387 - DNA, 1262 bp, Homo sapiens
tcagaaggccgaattggcgggagaataggtttggtggtccgagatccgaggcaacggtggctcctcgaggtccacggtcccggagatgggatttcgccatgttgcccaggctgatcttgaactcctgggctgaagatatccaccctcctcggcctcccaatgtgctgggattacaggcctgagccaccatgcctggcccaagtgttcattgatgatgagagatgggcttttcgcatcaaatcacaaaaatatgctgagtaatgtgaggattcttgcttttctggaagctaacacatagtcagtgccaaagtagtgacagaagaaatcttgagaggaagcatttttgtcttgtacttgaaacagctgctgggcccaccatggctcctgtgaagatcagccatgtggtatcattttcttctcaggatcccaagtatcctgtagagaacttgctaaacccagatagtccaaggagaccttggctcggctgccctcaggacaagagtgggcaattgaaagtagaactacagctggagagggcagtgcccactggctacattgatgtgggtaactgtggctgtgcgttcctgcaaattgatgtgggccattcttcctggcccctggacagacctttcataaccctgctccctgcaaccacgctaatgtctctaactgattcaaagcaggggaagaaccgctccggggtccgcatgtttaaagatgttgatttcctggctccagcctcaggagagttatgggatcgacttcgcctgacctgctcccgacccttcacgcgtcatcagtcctttggcctggcctttctacgggtgtgttcttctctggactccttagatgactctgtggtgggtccctcagcccttctgagctctgtgctgaacaaggtgggagaaatgttttagaggcaagagaggctgctaaacatcctacaatataaaggaaacatccccacagcaaaaaaaaaaaactgttcttctcaaaatgttgacagtgctggagatcagacacattgctctactttatattttattgtctgtccctgaacttctttattaaatggccaatattgtatggtaaaatcgagagtatcatcagaaagaaaattaagaaaaacaatcagaattagaaattagaggctcctctgcctatggaatagccattcttttattcctttgctttcttaataaactttgtctcacttaaaaataaaaagaaattagattttctggaaaaaaaaaaaaaaaaaa

SEQ ID NO: 388 - DNA, 1932 bp, Homo sapiens
ctcctatcggtggcgtcggtcgcaaagggagcagcccccgaggccgccgcgcagctccccgccgaggcctcggtgccccttcccattttccatccgcgctcccacgaaggttgaggcggcggggagaggcgaagccgcgagcgctcggccgggcggtcccgccgggtggtcgcagccatgacagcggctccccttccgcgcccctcccgccggagatgagggaagatgtccctgtcagggttaaggccaagctgaagttgctggcgtctaccttccacaagaaccaggagccgcagccgcggctcacgctccaccgcaacagacggtggggcgcgcggcggcggcctcgcagggcagggcgggggcgcagatgggggagtctcgggaccgacggcggcctaacgggtagaggccccgggtccccgccccttcctccctcagctggccccgccccgcccccgggactgcgcgaggcttgggtgggaggaggcggagggcgcgtctctccggctcctggcgcggggctgactcgggggccgctggcccctcttggccgccgtcgccacgcaccgaggtgggagcccgcggcggccggagccctcttgggacccatggtcgccctcggtcagcgggactgctcccgggacctcgacggggcggggcggggcgctccagcgttgtttgagcccaggcgcggaagggaaaaggcctctgagatgctcgcgtgttttgcctgggcgcggtggcgcacgcctgtaatcccaaagtgctgggattccaggcgtgagccaccgcgccgggacccaaggcccttaagttttaaggcctcattcttcagtcaggttttccctgttcccgcgtgttcggccaattttttgttgttgttgttttgtttttgtttttgtttttgagtcaattttccagacatctttaattagcaatatgtttaagtagttacaagcctttccttcttttcttgtgacagtttgggttgaatttctatcgtttgcagcctgtcactgtaaggcacaaacatgatcacgcaagatgcgatagtagatttaagccagttgtttttaagtttgtgtttaaggagaaactaacaatgaaaacggcctcgttgacggaggaaaagttggaatgcagcctctggtgctgtttgagcgatccctctccccggggcctggccgcgcgctgctgtgttctggaagggctcattgtacagtcaaggcggcagggccttcttctgtcacccatgctggagtgcagtagcatgatcacagctcacggtagcctccaccttctgggctcaatcctcctacctcagccttccaagtagctgggactacaggtatgcaaccaccatgtccagctaaattttgtactttttgtagagatggagtttcaccatgttggccagactggtctcaaactcctgacctcaagtgatccacctgcctcggcttcccaaagtgctggggtcacaggcgtgagacaccatgcccagcctgcccttcctttttaaacctttcctgtgcatagtgaagaataccatgactagtttggtgttactgcctttgtttgtgctgaagtaccagcatttttacccactattgtatttgcaccgttacagcaaatgtcaccatgttagtattcacgttaaaatagtttggacctgggcgtctgagggccccactttgggaaccgttgaaataggtacttaaacctactatatatcatatcttgtcatctacaagatttttaaaaaacatgatttcagttaattttttttgtaatttttacaatatggttttgaggggtttcagtccagagcaacaacatgtattttatttagcttatgctgaagtttactagataaatactaacctaatagaatgaggtcctaaatctttttttgcagtttctttagcc

SEQ ID NO: 389 - DNA, 5595 bp, Homo sapiens
gccgccgccgcagtccttagcttcccggggacaggaaaccttcaagaccgagctgccacggccgcctccccgcccgccccccattctacgcgcctgcccacaccctcctcccctccttccagcgcctttcggtggagcactgcggcactcagcccgagctgccgttttcccctcgcggggaacgctgtgacccccccgcaggagcggcggggcggggtgggggggcccgggagaagatggcgacgccgggaagcgaaccccaacctttcgtcccggccctttcggtagctactctgcacccacttcatcatccccaccaccaccaccaccaccatcagcaccacggaggaaccggcgcccccggcggggcgggtggtggcggcggtggcagcgggggcttcaacctgcccttgaaccggggtctggagcgcgcgcttgaggaggcggccaactccggggggctgaacctgagcgccaggaaattgaaggaatttccccgtaccgcagcccccgggcacgacctctcggacacggtgcaggcagacttatctaaaaacagactggttgaagttccaatggaattgtgccattttgtatcactggaaattcttaatctgtatcacaactgtatcagagtcattcctgaggccatcgttaatctgcagatgctgacttacctgaacttgagtcgaaatcagctgtccgccctgcctgcctgcctgtgtggtctgcctctcaaagtcttaatcgcaagtaacaacaaacttggatcattaccagaagagataggtcagctcaaacagttaatggagctggatgtcagctgcaacgagatcacagcgttgccccagcagataggtcagttgaaatctctacgagaactgaatgtcagaagaaattaccttaaagttttaccacaagaactagtagatcttcccttggtaaagtttgacttttcctgcaacaaagtgctcgtgattccaatttgttttagagagatgaagcagctgcaagtgttactacttgagaataaccctctgcagtctcctccagcacagatttgcacaaagggcaaagttcacatatttaagtatctgagcatacaagcatgccagattaagacagctgactccctttatctccacaccatggagaggccacatttacaccagcacgtggaagatggcaagaaggattctgattcgggagttggaagtgataatggagataagcgattatctgccaccgagccttctgacgaagacactgttagcctcaatgtgccaatgtcaaacatcatggaagaagaacagatcatcaaggaggactcgtgccatcgccttagccccgttaaaggggaatttcatcaggaatttcaaccggagccttcccttttgggtgacagcaccaactcaggagaagaaagagaccagtttactgatagagcagatggtctccattcggaatttatgaactataaggcaagggcagaagactgtgaagagctgttacggatagaagaggatgtgcactggcaaactgagggcataataagttcatccaaagatcaggacatggatatagcaatgatcgagcagctgagagaagcagtagatttgctgcaagatcccaatggattaagcacagatattacagagagaagtgttttaaacctatatcctatgggatcagcagaagccttagaattacaagattctgcactgaatggtcaaatacagctggagacatctccggtgtgtgaggtgcaaagtgatctaacattacagagtaacgggagccagtattctccaaatgagattagagagaactcccctgcagtctctcctaccacaaacagcacagctccatttggcctgaagcctcgatcagacccagccctcattcttcctcctatctccttcaacacacttacacaggcacagacatgggacagctctagctacagtgttccatctgaaggagacagtgacaatgtgtttctaagacctcagagaaatttggaatctatagacccgcagtttacaatccggaggaaaatggagcagatgagagaagagaaagagctggtggaacaacttcgtgagagcattgagatgagattgaaggtcagtctacacgaagacctgggggcagccctcatggatggtgtcgtcctctgccatctggtcaaccacatccgcccacggtcggttgcaagcatccatgtcccatcaccagcggttcccaaacttagcatggccaaatgcagaagaaatgtggaaaactttttggaagcgtgccgaaaattaggagtaccagaggctgacctctgctctccgtgtgacatcctgcagttggattttcgtcacattcgaaagactgttgacactctgctggcactcggggagaaagccccaccaccaacttctgccctccgctccagggaccttataggcttctgtcttgtccatattctctttatagtgctggtctatatcacttaccactggaatgctctgtccgcataatgtctgcacgtgcatccaaacgctgtgctctgtcgccctcaacctttgcagggtccttcctacctttgagcctttgccttgcaaacttccatccctgtcatgtcttcagttatctctcgagttttgaagctgaacagtagcaaatcagattttccagaagcacaaactttgtagaatacagtttagtataattcctctcacttactgaaatacaacgacgacgactgcaaagtgtatgcacaccgcatgcttcctcatccacatagtgccagcagcagtgccacgcagttcctcctctccctcccggtgagctgctgccctgggcagaggggaggagaattccaggacaagagtgtcaaggacagggatttagcatatggaagtctttcctttgggtcagtattgaactagaattctaattcgggactgggcaattgagctgtataggggccaccttgcagggaggacagaaaactaacattttggcccaacttgatctatacaaaactttaataataccactactgaccaagttggacgtgtacacgtactcacactgccttgatggccattcgattggattcctcccaaatttcctaaaaagggagccgcgaagggcgctgggcagtgtggccgccaacttccaccccggcaagcccctctgtcctatgcagaagggcgctcaagggaaggaagtgtcgttgctgttagagcctcacgtggaggagtcacttaaacaccagttttttactgcttaattccttgttaggtcttctcttgaggctcttagaaaagcgttttccagagagatttctatttttgaacaatggaacggatcactgcttttttgccacatcacatagtaactgccggtccagaatgtgacggattcgactctattcattttcaaataaagccatgagccgtggaacattcttggtcctggtgcttgggttatgatggcaggagtcaagaagaagattactttcattctagaagaatgtagtttctctaattatttgaaatgttcatttagcctttgattttcactgatattaactagcaaactgctttaagtcagctcaaaggattatatagtaactatatctgcatttggagcaatgtgatcagtttgcatttaaaaggaaaaaaaagaattttatcttagccagaatgtccctggattcaggggtgtctttgtataatatgagagggccttgttccaaggtcaaggcagcctccttattttacatgctgtttgccaaatcttgtttcttagcttggggagatgatggacttagcttcctcaagataaatttctagtttattaagatgcaaacagctctcatagatggctactacgaagaaaatcttatttttctgaacattttcatgaatccaggggacttgaaaatatggaagacccacatagttagaagaatatatttataaagattccttgctgctaagtcagatcagatttgctaacaggaagcattctttacatgacagtatcttgagttatgtgagttttttttcctcctgactttgtgttgattggtgaaatgcagggtatgtggaagttatctaattaacctcagttgtatatgaataacccacagatgtactgaattacttttggtgctatcttgtactcttcaatctgtaacacaataaaatccctttgtacgatgtctaatgagcaccctgagccataaattgcttaataaacacattttgggtgattattccaagtttttatcagcccattgatacatgtattcatgagctctcagcattcccatccagctctgcagtgcattgaggcttctctttaatggtcaccactgtggtggtttttcccttctttctggggagaaaatgggaaaaaaaaaaagaaaacttactgggttgccaccttaaaataatatcaataaaaactgagtaggacactcatgtaagagtagatttaattttcagtgttgatatagttcaattaaaacatgttaaagacaaattaaaagacatttatattttaattctggcatccaaagtattctttggacgcactttgattttttttgtgtcattaatttgtctgtactctgctgcgctgcacttcttgggatttattggatgatgttttttcattagtagtatggtaactagcagaacacaattaatttagtcctttaggcaaaaatttgaatgaactgttctgtccattgccaacccattaatttctaatcagaatattaagcttctctgtggtttttctccaaggtacccgtgcaccagcccatatgctaactggatgcctgcggatgcctgcccttgcagcttgactggggatacctggctgacctccttagagtctgagaagtagtcagggatgtcactgagtggtttattgtgctgaccaaatctcctcctcacaagaaagaccgttttttcagtactcccttccaatgttagataaaaggagccaagtatctatttacattttattttgaaatagccatttgtattctctttctccagtttctccaactggtggcaactctccactcagtgtcaggaattccaaaatttgtgacacctaatttctaatcatctttcctatttatggatttctggtttgttatttttagggagagacacttatgaaatggggctggtggaaaggggccccgcagaactacaatgtatgataatcgagtataaatttcatcaatgagagtagataaataaaggcacttgatagcctgctgctatttgtttgtaagaaattaaaactagcgcgtggtgagctgggttatctctcgaaaactcatgtagatgcctgattgagtcataaggacaaaagggtgttttgcctttgcctgtggggaaaaagtagggatgatattttaaaattttaagaaactgaaagttgttttggattaggtgaaaaatactttaatatgattttatttcaggagacttgatttttaaaaattaggcttcgtatttcaaaattagttctcaataaacaatcaatttggtatatagaaaaaaaaaaaaaaaa

SEQ ID NO: 390 - DNA, 3876 bp, Homo sapiens
aaaaacgaaagaagcccacagttgggacgaggattccagttttgcgtcaccgtcaaggcgggaaagttcccggctgtcggttggagggtgggtcctcgccccgccccgccccctcgggccgcccttccgcgcttccgggaggcttgtcccaagctcacggacccctcgctgggtgccggttaagaccccgctccccgtcgccagtgctatggaggcggcggcggcggtggtggcggcagaggcggaagtggaaaacgaagacggcgacagcagctgcggggatgtatgcttcatggacaaaggcttgcagagcatatcagaattatctttagattcaactcttcatgccgtcaatcttcattgcaataacatctccaagatcgaagccattgatcatatttggaatttacaacatctagatctgtcatctaatcaaataagtagaattgaaggactaaacacactgacaaaactgtgcacattaaatttgtcctgcaatttgattacaaaagtagaaggacttgaagaactaattaatctgactagactaaatgtatcttataaccacatagatgatcttagtggattgattccccttcatggaattaagcataaacttagatatattgatctacatagtaatcgtatagatagtatccatcacttacttcagtgtatggtaggattgcacttcctgaccaatcttattttggagaaagatggagacgataatcctgtctgtcgactgccagggtacagagcagttattctccagactttgccacagcttagaatcctagattgcaagaacatatttggtgaaccagtaaatttgacagaaataaattcatcacagctgcagtgcctagaaggtcttttggataatttagtttcttctgattctcccctaaatataagtgaagatgagatcattgatagaatgccagtgataacagcacctatcgatgagttagttcccttggaacagtttgcaagtacaccaagtgatgctgtgttgacgtcttttatgtctgtgtgtcaatcttctgagccagagaaaaataatcatgaaaacgatttgcagaatgagataaaacttcagaaattagatgaccaaattctacaacttctaaatgaaacttctaattcaatagataacgttcttgagaaagaccccagaccaaaaagagacacagatataacttctgaaagtgactatggaaacagaaaagaatgcaatagaaaagttcctcgaagatcaaaaatcccttatgatgccaaaaccattcaaactattaagcaccacaataaaaactacaactcttttgtaagttgtaatcgtaaaatgaaaccaccttaccttaaagaattatatgtaagctcatctttagcaaactgtcctatgttacaagaatcagaaaagccaaagactgaaataattaaagtagaccaaagtcactcagaagacaacacttaccagtcccttgttgaacagctagaccaagagagagagaagagatggagagctgagcaagccgaaaataaactcatggattatattgatgagctgcataaacatgcaaatgaaaaagaggatattcatagtctggctctacttaccacagataggctaaaggaaattatttttagagagagaaattccaaaggacaactcgaagttatggttcacaaacttcaaaatgaaattaaaaaactgactgttgaactaatgaaagcaaaagatcaacaagaggatcaccttaaacacttaagaaccctcgaaaaaacattagaaaaaatggagagacaaaaaaggcagcagcaggcagcacagataagactgatccaagaggtggaactcaaagcttcagctgccgatagagaaatatacttacttagaacttcccttcatcgagaaagagaacaagcgcaacaacttcatcaacttcttgcattgaaagaacaggaacacaggaaggaacttgaaacaagggagttttttactgatgctgacttccaggatgccttagctaaagaaatagccaaagaagagaaaaagcatgagcaaatgataaaagaataccaagagaaaattgacgtgttaagccagcagtatatggatttagaaaatgaattccgtattgctttaactgttgaagccagaagatttcaagatgttaaagatggttttgaaaatgttgcaactgagttagcaaagagcaaacatgctcttatttgggctcaacgaaaagaaaatgagtcttcctctttaattaaagatctgacctgtatggtaaaggaacaaaaaacaaaactggcagaagtttctaaattgaaacaagaaacagcagcaaatttacagaatcaaatcaacacccttgaaattttaattgaagatgacaagcagaagagtattcaaatagaacttctcaagcacgaaaaagtccagcttatttctgagctagcagccaaggaatcactaatatttggtttaaggacagaaagaaaagtatggggacatgagctggcacaacaaggatcttctctagcccaaaatcgtggaaaattggaggctcaaattgagagtttatctagagagaatgaatgtctgcgaaagacaaatgaaagtgatagtgatgcattaagaataaagtgcaaaatcatagacgaccaaactgaaactattagaaaattaaaagattgtttacaagaaaaagatgaacacatcaaaagattacaagaaaagatcacagaaatagaaaaatgcactcaagaacaacttgatgaaaaatcttcacaactggatgaggtacttgagaagttggaaaggcacaatgaaagaaaagaaaaactaaaacaacagttgaaaggaaaggaagtagaacttgaagaaatcagaaaagcttacagtacactgaatcggaagtggcatgataaaggagaacttctatgtcatcttgaaacacaagtaaaagaagtgaaagaaaaatttgaaaacaaggaaaagaaacttaaagcggaaagagacaaaagtattgaactacaaaagaatgcaatggaaaaacttcatagtatggatgatgcctttaaaagacaagttgatgcaattgttgaagctcatcaagctgaaatagcacagctggccaatgaaaagcagaagtgtattgattctgcaaatttaaaggtccatcaaattgaaaaagaaatgcgtgaacttttggaagaaacatgcaagaacaaaaaaacaatggaagcaaaaattaagcaacttgcttttgctttaaatgaaattcagcaagatatgtgatggttctgagaatgaatttaattgaaatagaccagcagacctattgtaaaaatgattaaatattgtaatagtagtaactgctatgactttgaaatgtctctttctatacatttcattatgaatatatttttaaagacttttgatcaagtatttattaattgtataggttttttataataaattgttgacaattttgtctattagaaaaaactatcataactagacttacaatatttttcttgtttctgtactatacattgtttggtaattacacatttgcctacaaatttgtgaatgaaaagattagtattttcaccatatgaggtaaaacattttaatcattgttatcttattgtgatgatgaagaactaattatatttgttatttaattgatgtagctcaattcttttaaagtacttatgtagccaaaaagcatttgaaatctgtatgataaaagatgtggcattcttaagaaagtatatgtagccatctccacatcactcattatgaccccttcttttataatgcttatatcttttcattaaagattacatttaaggttttataaa

SEQ ID NO: 391 - DNA, 3013 bp, Homo sapiens
accctgcaaccgggcagtctctttctgtttacggagagaaaggggaaatggaaaagtcggggaggcggtggctggcgtccgctgcgccgcccctgggcaggctcagacgccgtgagtcaggggcagagcagggcggtctgagcgtgcgggcgacgcgggtctcactcgtccgctccgctctggactgcgcgccacgctctggggtccggcgccctggttcctgcttctgccgctgccgccgccggatcccagtggcccggcgtgctcggctcccacaggcctgcagccagcatcgcaccgaaccttcggggggccgcggctggagcgctcggccggcgtgggagcgccaaggccgcagatgcaatcttcttaccgcgaagaagccaggggaataggtagccacatcttgtttgcagataagaaaggaagctaacgcagtatctgcaaagccaggagtctgactcagtacttttctcactcatgcatacaaagcagctaaaaatgacacagcttatttaccatgcccctgacactgcactgagcactttatgagcttgaactctgttaatcctcacgaccacctcatgagactctccagaaagagcaacagtaatggagtacatgagcactggaagtgacaataaagaagagattgatttattaattaaacatttaaatgtgtctgatgtaatagacattatggaaaatctttatgcaagtgaagagccagcagtttatgaacccagtctaatgaccatgtgtcaagacagtaatcaaaacgatgagcgttctaagtctctgctgcttagtggccaagaggtaccatggttgtcatcagtcagatatggaactgtggaggatttgcttgcttttgcaaaccatatatccaacactgcaaagcatttttatggacaacgaccacaggaatctggaattttattaaacatggtcatcactccccaaaatggacgttaccaaatagattccgatgttctcctgatcccctggaagctgacttacaggaatattggttctgattttattcctcggggcgcctttggaaaggtatacttggcacaagatataaagacgaagaaaagaatggcgtgtaaactgatcccagtagatcaatttaagccatctgatgtggaaatccaggcttgcttccggcacgagaacatcgcagagctgtatggcgcagtcctgtggggtgaaactgtccatctctttatggaagcaggcgagggagggtctgttctggagaaactggagagctgtggaccaatgagagaatttgaaattatttgggtgacaaagcatgttctcaagggacttgattttctacactcaaagaaagtgatccatcatgatattaaacctagcaacattgttttcatgtccacaaaagctgttttggtggattttggcctaagtgttcaaatgaccgaagatgtctattttcctaaggacctccgaggaacagagatttacatgagcccagaggtcatcctgtgcaggggccattcaaccaaagcagacatctacagcctgggggccacgctcatccacatgcagacgggcaccccaccctgggtgaagcgctaccctcgctcagcctatccctcctacctgtacataatccacaagcaagcacctccactggaagacattgcagatgactgcagtccagggatgagagagctgatagaagcttccctggagagaaaccccaatcaccgcccaagagccgcagacctactaaaacatgaggccctgaacccgcccagagaggatcagccacgctgtcagagtctggactctgccctcttggagcgcaagaggctgctgagtaggaaggagctggaacttcctgagaacattgctgattcttcgtgcacaggaagcaccgaggaatctgagatgctcaagaggcaacgctctctctacatcgacctcggcgctctggctggctacttcaatcttgttcggggaccaccaacgcttgaatatggctgaaggatgccatgtttgctctaaattaagacagcattgatctcctggaggctggttctgctgcctctacacaggggccctgtacagtgaatggtgccattttcgaaggagcagtgtgacctcctgtgacccatgaatgtgcctccaagcggccctgtgtgtttgacatgtgaagctatttgatatgcaccaggtctcaaggttctcatttctcaggtgacgtgattctaaggcaggaatttgagagttcacagaaggatcgtgtctgctgactgtttcattcactgtgcactttgctcaaaattttaaaaataccaatcacaaggataatagagtagcctaaaattactattcttggttcttatttaagtatggaatattcattttactcagaatagctgttttgtgtatattggtgtatattatataactctttgagcctttattggtaaattctggtatacattgaattcattataatttgggtgactagaacaacttgaagattgtagcaataagctggactagtgtcctaaaaatggctaactgatgaattagaagccatctgacagcaggccactagtgacagtttcttttgtgttcctatggaaacattttatactgtacatgctatgctgaagacattcaaaacgtgatgttttgaatgtggataaaactgtgtaaaccacataatttttgtacatcccaaaggatgagaatgtgacctttaagaaaaatgaaaacttttgtaaattattgatgattttgtaattcttatgactaaattttcttttaagcatttgtatattaaaatagcatactgtgtatgttttatatcaaatgccttcatgaatctttcatacatatatatatttgtaacattgtaaagtatgtgagtagtcttatgtaaagtatgtttttacattatgcaaataaaacccaatacttttgtccaatgtggttggtcaaatcaactgaataaattcagtattttgcctta

SEQ ID NO: 392 - DNA, 4362 bp, Homo sapiens
aaggggagggggaggagcggcgaaagcggaagccatgttggagtttcaccccgagcgaggggctgcgagggttctcctctccttgtgggtgtgaccaggttcggcgcggcggcgggccgcggggggcggggacgattggccgcttgtcgtcgtccgcagcggcgtgaggggagcggcggcggcggcggcggccgcagcgtggagccgggtgattgtgaccgccgggggagccgggagccggccgcggcgccctctctccgtgtggccccctgagcggcccccctcccctgcccgggagggaggcggggggcacctggggcccgccatgaaccccggcttcgatttgtcccgccggaacccgcaggaggacttcgagctgattcagcgcatcggcagcggcacctacggcgacgtctacaaggcacggaatgttaacactggtgaattagcagcaattaaagtaataaaattggaaccaggagaagactttgcagttgtgcagcaagaaattattatgatgaaagactgtaaacacccaaatattgttgcttattttggaagctatctcaggcgagataagctttggatttgcatggagttttgtggaggtggttctttacaggatatttatcacgtaactggacctctgtcagaactgcaaattgcatatgttagcagagaaacactgcagggattatattatcttcacagtaaaggaaaaatgcacagagatataaagggagctaacattctattaacggataatggtcatgtgaaattggctgattttggagtatctgcacagataacagctacaattgccaaacggaagtctttcattggcacaccatattggatggctccagaagttgcagctgttgagaggaaggggggttacaatcaactctgtgatctctgggcagtgggaatcactgccatagaacttgcagagcttcagcctcctatgtttgacttacacccaatgagagcattatttctaatgacaaaaagcaattttcagcctcctaaactaaaggataaaatgaaatggtcaaatagttttcatcactttgtgaaaatggcacttaccaaaaatccgaaaaaaagacctactgctgaaaaattattacagcatccttttgtaacacaacatttgacacggtctttggcaatcgagctgttggataaagtaaataatccagatcattccacttaccatgatttcgatgatgatgatcctgagcctcttgttgctgtaccacatagaattcactcaacaagtagaaacgtgagagaagaaaaaacacgctcagagataacctttggccaagtgaaatttgatccacccttaagaaaggagacagaaccacatcatgaacttcccgacagtgatggttttttggacagttcagaagaaatatactacactgcaagatctaatctggatctgcaactggaatatggacaaggacaccaaggtggttactttttaggtgcaaacaagagtcttctcaagtctgttgaagaagaattgcatcagcgaggacacgtcgcacatttagaagatgatgaaggagatgatgatgaatctaaacactcaactctgaaagcaaaaattccacctcctttgccaccaaagcctaagtctatcttcataccacaggaaatgcattctactgaggatgaaaatcaaggaacaatcaagagatgtcccatgtcagggagcccagcaaagccatcccaagttccacctagaccaccacctcccagattacccccacacaaacctgttgccttaggaaatggaatgagctccttccagttaaatggtgaacgagatggctcattatgtcaacaacagaatgaacatagaggcacaaacctttcaagaaaagaaaagaaagatgtaccaaagcctattagtaatggtcttcctccaacacctaaagtgcatatgggtgcatgtttttcaaaagtttttaatgggtgtcccttgaaaattcactgtgcatcatcatggataaacccagatacaagagatcagtacttgatatttggtgccgaagaagggatttataccctcaatcttaatgaacttcatgaaacatcaatggaacagctattccctcgaaggtgtacatggttgtatgtaatgaacaattgcttgctatcaatatctggtaaagcttctcagctttattcccataatttaccagggctttttgattatgcaagacaaatgcaaaagttacctgttgctattccagcacacaaactccctgacagaatactgccaaggaaattttctgtatcagcaaaaatccctgaaaccaaatggtgccagaagtgttgtgttgtaagaaatccttacacgggccataaatacctatgtggagcacttcagactagcattgttctattagaatgggttgaaccaatgcagaaatttatgttaattaagcacatagattttcctataccatgtccacttagaatgtttgaaatgctggtagttcctgaacaggagtaccctttagtttgtgttggtgtcagtagaggtagagacttcaaccaagtggttcgatttgagacggtcaatccaaattctacctcttcatggtttacagaatcagataccccacagacaaatgttactcatgtaacccaactggagagagataccatccttgtatgcttggactgttgtataaaaatagtaaatctccaaggaagattaaaatctagcaggaaattgtcatcagaactcacctttgatttccagattgaatcaatagtgtgcctacaagacagtgtgctagctttctggaaacatggaatgcaaggtagaagttttagatctaatgaggtaacacaagaaatttcagatagcacaagaattttcaggctgcttggatctgacagggtcgtggttttggaaagtaggccaactgataaccccacagcaaatagcaatttgtacatcctggcgggtcatgaaaacagttactgagaattgttgtgctttgacagttaactctagaaagaaagaacactaccactgcaacattaatggatgcttgaagctgtacaaaagctgcagtaacctgtcttcagttactttgtaatttattgtggcatgagataagatggggaaaattttgttttaagtggtatggatatatttagcatattgaaccacacaagtgcttaattcattgttatgtaatctttgtacatataggcagtattttttctgtgaaacttcatattgctgaagacatacactaagaatttatgtagataatgtacttttatgagatgtacaagtaagtgtcttatctgtacagatgtaaatgttgatgaaaatgcaattggggttaatattttaagaattctttagtatattcttgggtgtggctatattacaaaatgggatgctggcaatgaaacaatacatttaacactattgtatttttattatatgtaatttagtaatatgaatataaatcttgtaacttttaaaattgtaatggaggctgtaatcattttataatctttttaattttaatgcaagtacactggtgtttatatttgcacaaagtattgatatgtgatgtattaagtcacaaaagtaagctgtgacattgtctataagcatttggctccacaaatgtatttggattgttttctatgtgaagcaaaccaattataattaaccacatgttgtagtaactggtctttttatatttaagcagaatcctgtaagattgcttgtctttgcttaaaaacaatacctttgaacatttttgaatcacagaatagcggtaccatgatagaatactgcaattgtggtcagaattacagtatgcacaaagaattaattagcattattaaagagtcctcactaaacatttcatatgatcacactgaagaactgtaacattccatagagtgaagtggttcaaatttctcttggaatttttacttttgttggccttattttatgatccttttcatatttcttttgacttagagtattaatacatggccaaaataatttagttactacctcatacaaacaatataatggttactacacatcacaggaacttagttttggtttaagtcatttttgattgcttttttccaatggaatatgtatataccaggttttagcaaaatgcacacttttggctctttttggtatatgttctttatattttaatgtgagtatatacactaagaacaaactaaattgtgatttatgatcttcatttattttaatgataatggttttaaaatatgttcctgattgtacatattgtaaaataaacatgttttttaacatgctgttgtatagta

SEQ ID NO: 393 - DNA, 10724 bp, Homo sapiens
caaggagaagccgcagtacccgcggctcgggtgcagcgcgggagcacagtggagcgcagatcgcggacccgagcgggcatgtccccgcgcgcgggagcctccgtttgcggccgggcccgggcggctgtgaacttagcagcgggctcctgcggccccgtcactgccatgtagtcgctggcggggctccctgcagcccgggagcggcagtgccagtgagcctgagcccaggagcccgcgtcttccccgggaggcgctgagtgcgcgccgcgcccccgccgctcgggaggcactttgggccagacagggaaatgggggagaaagtttcggaggcgccagagccggtgccccgcggctgcagtggccacggcagccggactccagcctctgcgctggtcgccgcgtcctctccgggtgcttcctcggccgagtcctcctcgggctcagaaactctgtcggaggaaggggagcccggcggcttctccagagagcatcagccgccgccgccgccgccgttgggaggcaccctgggcgcccgggcgcccgccgcgtgggctccggcaagcgtgctgctggagcgcggagtccttgcgctgccgccgccgcttcccggaggagctgtgccgcccgcgccccggggcagcagcgcgtcccaggaggagcaggacgaggagcttgaccacatattatcccctccacccatgccgtttcggaaatgcagcaacccagatgtggcttctggccctggaaaatcactgaagtataaaagacagctgagtgaggatggaagacagctaaggcgagggagcctgggaggagccctgactgggaggtaccttcttccaaacccggtggcgggacaggcctggccggcctctgcagagacgtccaacctcgtgcgcatgcgcagccaggccctgggccagtcggcgccctcgctcaccgccagcctgaaggagctgagtctccccagaagaggaagtttttgccgaacaagcaaccggaaaagcttaataggcaatgggcagtcaccagcattgcctcgaccacactcacctctctctgctcatgcaggaaatagccctcaagatagtccaagaaatttctcccccagtgcctcagcccatttttcatttgcacggaggactgatggacgccgctggtcgttggcttctctcccttcctctggctatgggacaaacacacccagctctacggtctcttcatcctgttcctcccaggagaagttgcatcagttaccataccaaccaacaccagacgagttacacttcttatcaaaacatttctgtaccaccgaaagcatcgccactgagaacagatgcaggaacacgccgatgcgcccccgttcccgaagtctgagccctggacgttctcccgcctgctgtgaccatgaaataattatgatgaaccatgtctacaaagaaaggttcccaaaggctacagctcagatggaagaacgtctaaaggaaattatcaccagctactctcctgacaacgttctacccttagcagatggagtgcttagtttcactcaccaccagattattgaactggctcgagattgcttggataaatcccaccagggcctcatcacctcacgatacttccttgaattacagcacaaattagataagttgctacaggaggctcatgatcgttcagaaagtggagaattggcatttattaaacaactagttcgaaagatcctaattgttattgcccgccctgctcggttattagagtgcctggaatttgatccggaagaattttactacctattggaagcagcagaaggccatgccaaagaaggacagggtattaaaaccgacattcccaggtacatcattagccaactgggactcaataaggatcccttggaagaaatggctcatttgggaaactacgatagtgggacagcagaaacaccagaaacagatgaatcagtgagtagctctaatgcctccctgaaacttcgaaggaaacctcgggaaagtgattttgaaacgattaaattgattagcaatggagcctatggggcagtctactttgttcggcataaagaatcccggcagaggtttgccatgaagaagattaataaacagaacctcatccttcgaaaccagatccagcaggcctttgtggagcgggatatcctgacttttgcagaaaacccctttgttgtcagcatgtattgctcctttgaaacaaggcgccacttgtgcatggtcatggaatatgtggaagggggagactgtgctactttaatgaaaaacatgggtcctctccctgttgatatggccagaatgtactttgctgagacggtcttggccttggaatatttacataattatggaattgtacacagggatttgaaaccagacaacttgttggttacctccatggggcacataaagctgacagattttggattatctaaggtgggactaatgagcatgactaccaacctttacgagggtcatattgagaaggatgctagagagttcctggataaacaggtctgtggcacacctgaatacattgcaccagaagtgattctgaggcagggttatggaaagccggtggactggtgggccatggggattatcctctatgaatttctggttggatgcgtgccattctttggggatactccagaggagctatttggacaagtcatcagtgatgagatcaactggcctgagaaggatgaggcacccccacctgatgcccaggatctgattaccttactcctcaggcagaatcccctggagaggctgggaacaggtggtgcatatgaagtcaaacagcatcgattcttccgttctttagactggaacagtttgctgagacagaaggcagaatttattccccaactggaatctgaggatgacacaagttattttgatactcggtctgagaagtatcatcatatggaaacggaggaagaagatgacacaaatgatgaagactttaatgtggaaataaggcagttttcttcatgttcacacaggttttcaaaagttttcagcagtatagatcgaatcactcagaattcagcagaagagaaggaagactctgtggacaaaaccaaaagcaccaccttgccatccacagaaacactgagctggagttcagaatattctgaaatgcaacagctatcaacatccaactcttcagatactgaaagcaacagacataaactcagttctggcctacttcccaaactggctatttcaacagagggagagcaagatgaagctgcctcctgccctggagacccccatgaggagccaggaaagccagcccttcctcctgaagagtgtgcccaggaggagcctgaggtcaccaccccagccagcaccatcagcagctccaccctgtcagttggcagtttttcagagcacttggatcagataaatggacgaagcgagtgtgtggacagtacagataattcctcaaagccatccagtgaacccgcttctcacatggctcggcagcgattagaaagcacagaaaaaaagaaaatctcggggaaagtcacaaagtccctctctgccagtgctctttccctcatgatcccaggagatatgtttgctgtttcccctctgggaagtccaatgtctccccattccctgtcctcggacccttcttcttcacgagattcctctcccagccgagattcctcagcagcttctgccagtccacatcagccgattgtgatccacagttcggggaagaactacggctttaccatccgagccatccgggtgtatgtgggagacagtgacatctatacagtgcaccatatcgtctggaatgtagaagaaggaagtccggcatgccaggcaggactgaaggctggagatcttatcactcacatcaatggagaaccagtgcatggacttgtccacacagaagttatagaactcctactgaagagtgggaataaggtgtcaatcactactaccccatttgaaaacacatcaatcaaaactggaccagccaggagaaacagctataagagccggatggtgaggcggagcaagaaatccaagaagaaagaaagtctcgaaaggaggagatctcttttcaaaaagctagccaagcagccttctcctttactccacaccagccgaagtttctcctgcttgaacagatccctgtcatcgggtgagagcctcccaggttcccccactcatagcttgtctccccggtctccaacaccaagctaccgctccacccctgacttcccatctggtactaattcctcccagagcagctcccctagttctagtgcccccaattccccagcagggtccgggcacatccggcccagcactctccacggtcttgcacccaaactcggcgggcagcggtaccggtccggaaggcgaaagtccgccggcaacatcccactgtccccgctggcccggacgccctctccaaccccgcaacccacctccccgcagcggtcaccatcccctcttctgggacactcactgggcaattccaagatcgcgcaagcctttcccagcaagatgcactccccgcccaccatcgtcagacacatcgtgaggcccaagagtgcggagccccccaggtccccgctgctcaagcgcgtgcagtccgaggagaagctgtcgccctcttacggcagtgacaagaagcacctgtgctcccgcaagcacagcctggaggtgacccaagaggaggtgcagcgggagcagtcccagcgggaggcgccgctgcagagcctggatgagaacgtgtgcgacgtgccgccgctcagccgcgcccggccagtggagcaaggctgcctgaaacgcccagtctcccggaaggtgggccgccaggagtctgtggacgacctggaccgcgacaagctgaaggccaaggtggtggtgaagaaagcagacggcttcccagagaaacaggaatcccaccagaaatcccatggacccgggagtgatttggaaaactttgctctgtttaagctggaagagagagagaagaaagtctatccgaaggctgtggaaaggtcaagtacttttgaaaacaaagcgtctatgcaggaggcgccaccgctgggcagcctgctgaaggatgctcttcacaagcaggccagcgtgcgcgccagcgagggtgcgatgtcggatggccgggtgcctgcggagcaccgccagggtggcggggacttcagacgggcccccgctcctggcaccctccaggatggtctctgccactccctcgacaggggcatctctgggaagggggaaggcacggagaagtcctcccaggccaaggagcttctccgatgtgaaaagttagacagcaagctggccaacatcgattacctccgaaagaaaatgtcacttgaggacaaagaggacaacctctgccctgtgctgaagcccaagatgacagctggctcccacgaatgcctgccagggaacccagtccgacccacgggtgggcagcaggagcccccgccggcttctgagagccgagcttttgtcagcagcacccatgcagctcagatgagtgccgtctcttttgttcccctcaaggccttaacaggccgggtggacagtggaacggagaagcctggcttggttgctcctgagtcccctgttaggaagagcccctccgagtataagctggaaggtaggtctgtctcatgcctgaagccgatcgagggcactctggacattgctctcctgtccggacctcaggcctccaagacagaactgccttccccagagtctgcacagagccccagcccaagtggtgacgtgagggcctctgtgccaccagttctccccagcagcagtgggaaaaagaacgataccaccagtgcaagagagctttctccttccagcttaaagatgaataaatcctacctgctggagccttggttcctgccccccagccgaggtctccagaattcaccagcagtttccctgcctgacccagagttcaagagggacaggaaaggtccccatcctactgccaggagccctggaacagtcatggaaagcaatccccaacagagagagggcagctcccctaaacaccaagaccacaccactgaccccaagcttctgacctgcctggggcagaacctccacagccctgacctggccaggccacgctgcccgctcccacctgaagcttccccctcaagggagaagccaggcctgagggaatcgtctgaaagaggccctcccacagccagaagcgagcgctctgctgcgagggctgacacatgcagagagccctccatggaactgtgctttccagaaactgcgaaaaccagtgacaactccaaaaatctcctctctgtgggaaggacccacccagatttctatacacagacccaggccatggagaaagcatgggcgccgggtgggaaaacgaaccacaaagatggcccaggtgaggcgaggcccccgcccagagacaactcctctctgcactcagctggaattccctgtgagaaggagctgggcaaggtgaggcgtggcgtggaacccaagcccgaagcgcttcttgccaggcggtctctgcagccacctggaattgagagtgagaagagtgaaaagctctccagtttcccatctttgcagaaagatggtgccaaggaacctgaaaggaaggagcagcctctacaaaggcatcccagcagcatccctccgccccctctgacggccaaagacctgtccagcccggctgccaggcagcattgcagttccccaagccacgcttctggcagagagccgggggccaagcccagcactgcagagcccagctcgagcccccaggaccctcccaagcctgttgctgcgcacagtgaaagcagcagccacaagccccggcctggccctgacccgggccctccaaagactaagcaccccgaccggtccctctcctctcagaaaccaagtgtcggggccacaaagggcaaagagcctgccactcagtccctcggtggctctagcagagaggggaagggccacagtaagagtgggccggatgtgtttcctgctaccccaggctcccagaacaaagccagcgatgggattggccagggagaaggtgggccctctgtcccactgcacactgacagggctcctctagacgccaagccacaacccaccagtggtgggcggcccctggaggtgctggagaagcctgtgcatttgccaaggccgggacacccagggcctagtgagccagcggaccagaaactgtccgctgttggtgaaaagcaaaccctgtctccaaagcaccccaaaccatccactgtgaaagattgccccaccctgtgcaaacagacagacaacagacagacagacaaaagcccgagtcagccggccgccaacaccgacagaagggcggaagggaagaaatgcactgaagcactttatgctccagcagagggcgacaagctcgaggccggcctttcctttgtgcatagcgagaaccggttgaaaggcgcggagcggccagccgcgggggtggggaagggcttccctgaggccagagggaaagggcccggtccccagaagccaccgacggaggcagacaagcccaatggcatgaaacggtccccctcagccactgggcagagttctttccgatccacggccctcccggaaaagtctctgagctgctcctccagcttccctgaaaccagggccggagttagagaggcctctgcagccagcagcgacacctcttctgccaaggccgccgggggcatgctggagcttccagcccccagcaacagggaccataggaaggctcagcctgccggggagggccgaacccacatgacaaagagtgactccctgccctccttccgggtctccaccctgcctctggagtcacaccaccccgacccaaacaccatgggcggggccagccaccgggacagggctctctcggtgactgccaccgtaggggaaaccaaagggaaggaccctgccccagcccagcctcccccagctaggaaacagaacgtgggcagagacgtgaccaagccatccccagccccaaacactgaccgccccatctctctttctaatgagaaggactttgtggtacggcagaggcgggggaaagagagtttgcgtagcagccctcacaaaaaggccttgtaacggggagggcccaggggcaggactgtggagacccgtcctgaacgggcgactgtgtcttgactacctttcaaaaccagcactgtgtgggaatgtccgccaggcagagctcggagcctcattgagacaggggagagagaaagacaaagaggggaccttcttccagatgccttcccagttgtaaccggtaaaactgttaccagatagtgtttgtacaaaaaaaaaaaaaaaaaaaaaaaaaaaaattacctttacagttgagggttgttgaggaaaatgattttctttgtaaatatatagcatcgtgtttggtttgggatgtagagtctatacctggctgctgattgcgtcgtttactacagctttttttaaataagatttttgctttaccatttatcataatgtagtaatgaagcaaaatggtcaaaactgggtgtgtgtgaacagagatacacccatattcgtgtatatacacatccacctacatgttttggtctgtggtttaagagactatttcaaggttccatttttataagctaaaacattctaagttaagatggaagaaagccctaaacacagtagattctgagtttttatgtgtattttaaccagagtttctgatagtactgtatctggctacctatatttccagatctaaagcaagaactactctaagtactgcatttggaatcctcctccattaggaatggccaggacaagtggagctagccattttcattacacggccatcccaatggacactggatccctggtccaactgtctaaaaggccagttgttcctttctgtggatgtggatgtctggccttcacctgaggtagagcggggactataaacacacatcaactttctttctgtttgctttcttttccttcttttcaaactcttaaactcaggcctttatgctgtgagtgactagtccaagaagcacacattttgtagtagtcctgcaccagccctgctcttgaataaaaaggaaaattactggctgcacccaaatcttctagtacttgagtaataagcatcaggcattggaagaggttttaaatttgcttttttgaggaaaagaactgggggtggattttggcatcgtagcatatcgattaaagaataatcaggacatcagatacattttaatacatagctggggccttatgttgtagatgaagcttgctgtttttagcaagttcctgggtttcacattcatttctgctgcatctagtagctccacacatttcataacctgatctctttatttgtatgcaaaaaatactgtcttaatacagagcagcatttttgtaacaaagagactcgctggagctatttggtgcttgaatgtgaccatcctttttacttttgctaagccttatttaaattttgtataccgtggaatatgtagaatttgtcaaatcattttagtgctgaaggtttttgatttcttgtttttgtttctgttgttgcagtttctttggtggcttgttttgtattgtaagatggcacttgctgatataaatactaaggcactaagagaaaatacagataagtatttataagttgcttgggaaccatagcagaattttttgtttggttttgtaagagaaaaaaaattaccaataaataactgatctagcacccaaactctcttgggggatgtcttagtatcttcacgctataaaattgttcatctaagcacagcatcatcttatggccttatggattgtaaatcttctagtgaggctataaactccactctgaaaacaaaggcataacttaaccgactgctcagttgtccttcgttgtaaaatgaattggctttgggaaaaaggaaaaaaacaaacaaaaaaagaaaaagaaaaaagcctcctccttgcccctaatttttttttcccatatggttttagccattccccatcactatattgtgaagctgtaaaaatatatatatatactttacaagagtttactaatggatttcaaaactggtctcaacgtttataatacatatctgtgtttggcagttgtcataacccaatcctacattcagccatcgggacaagtctgtcggggaggtagttcatggtttacaagcctttgctttttaactgtccaatttcctttaaagcacaactagctatttgtttacaaatgatatttttatgtatattttgtatagtgtatcatcatttttgccaaatatgtttttcattataaatgagtaaagagtacttaaggttgcattcatgtattacatgtttgttgttgtaaacctctccaatcagctggtagaaattctcctcattgtgttctatttggtcagtctctgtgtgattgtaggatgtgctccttggtagtactcccagctgtagatttaccagcttaaaagtttgttaggatctgtgcaataaagtgtttgcagtcttattttctctaagaaattccttatggacgtcataattgttgtatattgaacaaaatatttatacttatgcagttgcataacattgaaataaaaatttagcatgaaaaga

SEQ ID NO: 394 - DNA, 4300 bp, Homo sapiens
caacccgcgaggccccacactttctgcgccagctgggagtgcgcgccctgcagagccagtgggtgggcggttctagctcttcccaccctcactgcgggcctctgctgtcacacgcccggggtggcgaaacggtcgccacctgagtctccattctgctgcagtggcccctgcgttaaagctctctcgtggtgcggctgccgaggctgcggtagctcctgcgcccccgtgctggtggcgcagcctctgcttgctgccgacctggcggaagggtgcgggagcgcacgctacgggcagcgtcggtctgcgtccttcctcctcctattccgacccccgcatcccacgcccccgcctcgctctacgcctcctccctggctgcaggcagaccgcttcacacagccgcagtgccctgtgtgtggacagcctgtgggagactcgcacgcccacactcaccccgcctggctgcacccctgcccagcatgtcggcgctcgagtggtacgcccacaagtctctaggcgatggtatcttctggattcaagaacgtttctacgagtcgggcaaccgtgccaacatctggctggtgcgcggctccgagcaggacgtggtgatcgatacaggcctggggctgcgcagcctcccggagtacctgtactcctccggcctcttgcaggaccgagaggccaaagaggacgcggcgcgccggccactgcttgccgtggccacccacgtgcacttcgaccactccggcggcctctaccagttcgaccgcgtggcagtgcaccacgccgaggccgaggcgctggctcgcggggacaactttgagaccgtgacctggctttccgatagcgaggtggtgcgggcgcccagccccggctggagggccagacagttccgggtacaggcggtgcagcccaccctcatcctgcaggatggggatgtgatcaaccttggtgacagacagctcactgttatgcacatgccaggtcactccaggggcagtatttgcttacatgacaaagaccgaaagattctcttcagtggagacgtcgtgtatgatggatcactgattgactggctcccatacagcaggataagtgactatgttggaacttgtgaacgtctaatagaattagtggacagaggtctggtagagaaggtgcttcctgggcacttcaatacctttggtgctgaaaggctttttcgattggcttctaactatatttcaaaagctgggatatgtcacaaagtttctacttttgccatgcgatctcttgcaagtttagctctacgtgtaacaaattctaggacctcgccctagtatctatactgataatatattttgattaattatatacattaattcattctgtgctatttaactgattaatagtgagcatttcatgaagtgcttttataccactattatatatcagagaaagattgagaatgaataagccaaaaagaaaattgttagtttaaattgttttctttcttccaagaaagaagccacttaaataagcttatactttgccaaagctgtcatcttgtaatatatgctctagaaatgacataaaggtttatggggaagcaaagagagattttgtggcaagagaactgcccttgcctctgtttttcttgttttattcccttgatgacctagggaaaaaaaggcatgtagagtattatgtttatactttaaacttgatatttttagtgtattatttaaagataaaggttcttgggtttaaaatacattagaacttaatgcagacatataaagtaacattgagaatgacaactaaaacattccattgttatggtcctgaattttttatgcttcatttcatgtatttattctttgtataattatagcatacatgttatgtaatataacttatgaaaagtacagtgaattttgctttattgcaaagctttaaatataaatttcagagtgcttcagtaaaaagctactatatattgttgtttgttattgtgtaggtaatattttcaattatgaaagtgaaatgcaaatgtctgttatctaactacaaattgtcagatttcttaaaaggacactgtcaggcaaatttgaaaatatacacattgagaataattttttattattatatcctattttaatattaacagctattatgaacaaaatttttcctgttaaatagcgacttcagtattgtgttatgttttacagcgttaaaacaactatgaagatctgcagctattcttttacttaacatgcatatgtactacagagggatttttaaattaattgcaaaatgtgcattagctattgacttagagtgaattgccttttgtatcctgattcacaacacctattcctgttcagtattctttgtcttgaatagagaagtctatgttcgtaaagtcatataaaaggttataccactatttagtaaaaagttttagtttggtgctgttaataataatttgctaaaaggccttttagaatatttcataaagggttttaaacagttttttcccactgcctttttattattgacatatctaaaaccaaactgaaatcgctttggaaatcagattttttaatgttaggaagatccagcaattttggtttctgaaaaattacaaaacttttctaccctacagatgcccaggttctttagttttttattcattcaactcacacacacataaacatatacatacacaaacacaatcccacatgcaaacacacacagccacatatatacatgtgtagcacagcgctaaacactgtggaggctaaaaaaagtcaaagacaacattataactaaaagtcgaaagcacacaaaatataaataatagtgtatgcaagttaatgtacattatacatgcgtgtaagggacataaatggaggggtgtgaactttggttaggcaaagtttactggaggaggggtttttgagtcaaatttggaaggatgaacttgttagatagtcagagttggaaacaaaacaatccaagaatagggatataagcattgctagtctagaatagtctattccttgtgaaaatataaatttaattttcaggaatccagtatattccaaacatcacatatttagcatgagaaaaattgatttgtgattgtgtatatgagtcattgttaatgggagacaagctgaactgccacatgccaccaaatgaacctttacttcaatcaaaaaggagggtatgattggttcaattatattaacagaatatcatgggcatttctctatgatggtcattcaaggtagtaggtctctttcaactgagtgcaacattgagaataatgatttggttcagggcaactacaaataatcacttactaagccttaaataaagccattatttttatatcaatagcacaaaggaaaaccaaaagtccttaaccactgaccatttttatcatattttaggcctttttttaaaaaatcagggtatagtaggcactaagttttattaggaaatatttaaacctgctgaaggatttatttataaaaagtgcaatttttcaaaacacattattattttttaatttcccaattttttcagtttttcaaattgtaccacaacatagaactgtgatattttgctattacttcaatgtgaataaataaggtaaagtatatcatttattgagtgcccatgctgtacatttaaaatatgcattatttaatttaatcttactcccagcaccaaaaggtaattgaccagcctcaacacaattttggacaaagctagtaactgaacacaggtctgtctgccccacacttctctttctcttgtaactgcacaatagcagaaaattggcaagatgtatttttactttccaagatgccgtgtgtgccaagaataaatgaaatgatgttaaagcataataataacatatctttaaaaagcttttcaaaatatattttcaccctgacagtgacccttgtaacttaaatgatttttggaaatattagtatgtaagtataattcaaagttgtcaaaatgtaagacatttagaagtaatttttattatttatattgttaatacttaatcactggaaattcattttccttactcgatgttttctttcaactgagaagcctaaaacaaacaaaaaccttgtgtgttatcctgatatagttgactaaatgtatttgttcttatatggatagtaatatgaatgtgacatgcaccaattgtcctattataattttcagataagtgtaactaagcacttgtgtaataaatattagtcattttatttcaaaaaaaaaaaaaaaaaaaaaa

SEQ ID NO: 395 - DNA, 6404 bp, Homo sapiens
ttacatcttatagcacccagtgaattatgatatggggctgcggtttatttgctctggcgacaatatggcttacttgccgtggaatatcccggtatttcagaagtaacatattatttttaaagagggagctttgctttctctaaatcacatggtgcaaagttgggaatacagtggcctgtaaattacaaatattatttacaaactagaaggaaagctgacatgtgtttgtgcctgtgtgacagtttcactaaggaattccaaaactgtggatagcctgttacttgagaaaaatacacggtggcagtcttgcagatgtttttcccgcctgttagccctccaggttcaaaaactgtttggtgcattttaaggcggcagtctcaccagatcgcaggattctagtctaattggcttctaaccttcaatctaaccttgccggcttccttgcaaagcccggtgcaagggcctctttcaaaatgaacccactggtgtgcctagcagtcggtagaagaagcgggagggcgtccggtctgcacgcccgccgcgaggttacaatgctgaacgcatgagatggaagataccaacgggaggccgaggggatccacggcgcccgcgcgggctccggcttcctcctgctctcggcgccgctgggcgaccgcccatgacccgctcttgcgggctctgtccggttgacaggcgaccctgtggcccggggaagcgcgggagggcgccggcggaaagttgaagagcgtttttctcgccgccgcgtgcattaggagctcgacgagtccgccctgggcttcctggtggggctgggcgggcgggggaggggccgcgcagcagcagcggaagccagacctcggcgataagaggctgcacagcgacatgcaacagtcttttcactgcagctgaatgagttgtggcgcccacaatgctcccatgacaaggagctgacaagttccattttccgtcgcgggcatcttggaatcatgactcccacaatgccttgggcacttggtcgacagtggggccgcctctgaaaaaaaaatgtgagaggttggtactaagaagtgcctttcctgacgtctctgctgcttggaaccgcttctagagcagtctctgcttttgccttgcttgctgccagctagactgtgacgacagcacatccaccctccacctctagcccagacacccccatttctacttataatcaagagaaaagctctaagtatctggcattgccctaggctgctttagtgttaaaagaaaagtttgctgaaaaagtaagatatcttctgccaggaaatcaaggaggaaaaaaaaaatcattttctcgattttgctctaaactgctgcatctgtctatgccaaactaatcaataccgattgcaccaccaaactccattgcaaattcagctgtgaggagattccctttcagacaactttgctgaaagcagcttggaaattcggtgtcgaagggtctgccacgttttcatgcttgcattttgggctccaaattggcactgggaaggggttactgagagcacaaggctgataccaggccctacttttaaacgttcatctacttacaatcctagtatttctctaaaaaccaaaacctctttgaattaacagtttcatgctgtgaatttctagtgggagatcttttccttgatattgacgacacaattttccatgtacttttaaagcagggagtggggaaaagtattttgaggggacattttcatcatcagttcagctttttttttttggttgttgctcttttttgggggggttgggtttgttggtttcactgaaacatttaactacctgtaaaatctaaacatggctgttagtgtcacaccaattcgggacacaaaatggctaacactggaagtatgtagagagttccagagggggacttgctcacggccagacacggaatgtaaatttgcacatccttcgaaaagctgccaagttgaaaatggacgagtaatcgcctgctttgattcattgaaaggccgttgctccagggagaactgcaaatatcttcatccacccccacatttaaaaacgcagttggagataaatggacgcaataacttgattcagcagaagaacatggccatgttggcccagcaaatgcaactagccaatgccatgatgcctggtgccccattacaacccgtgccaatgttttcagttgcaccaagcttagccaccaatgcatcagcagccgcctttaatccctatctgggacctgtttctccaagcctggtcccggcagagatcttgccgactgcaccaatgttggttacagggaatccgggtgtccctgtacctgcagctgctgcagctgctgcacagaaattaatgcgaacagacagacttgaggtatgtcgagagtaccaacgtggcaattgcaaccgaggagaaaatgattgtcggtttgctcatcctgctgacagcacaatgattgacaccaatgacaacacagtcactgtgtgtatggattacatcaaagggagatgctctcgggaaaagtgcaaatactttcatccccctgcacatttgcaagccaagatcaaggctgcccaataccaggtcaaccaggctgcagctgcacaggctgcagccaccgcagctgccatgggaattcctcaagctgtacttcccccattaccaaagaggcctgctcttgaaaaaaccaacggtgccaccgcagtctttaacactggtattttccaataccaacaggctctagccaacatgcagttacaacagcatacagcatttctcccaccaggctcaatattgtgcatgacacccgctacaagtgttgttcccatggtgcacggtgctacgccagccactgtgtccgcagcaacaacatctgccacaagtgttcccttcgctgcaacagccacagccaaccagatacccataatatctgccgaacatctgactagccacaagtatgttacccagatgtagaattttcatcactaaacaatcatgctaaagaggaaaggacagtgtgcttggttagagtaaaggacgaggtcattagccatattgtatatatcgtcaagcaacacacacaaaagttcctcagccacaagacatccacatattgcatgttaaccagaagaaaagacaacattttccggaaatccactgcacactgttgcctatacactttgtacatttaattgatatttgtgctgaggtgatattcctgtctaaaagaacaacattgtctttcttttctagcacagagttatgcattcaaagatgcatacctagttagtttcctatatattcatgccatcttgaaaagacagactatggtgtaaccatgattctattatgtattggtacgtctgtagaccaagatataattttttaaaaataagtttatttctttcaaggtttacaaataacaaaggtgcaccttgtatttaaaattgccattatagatgagagcgtgcatgcacagtcatttttgtttaagagtaatatttttaatgtaatagattgtaagacgtggtgagggagggatctgacagagatgaatgtgccaagcaaaaccacaactgtgtatattttaaagcacatcatggctttaagtaccatgttgttaaggattctcatgaagtgccatagactgtacatcaaattagagtattatttcttcagtgttattgttttcagagccacattttgttgcatatttgctagtactaatcagtcaaagggcaccattctttttttttttttttgaaaccaaagctgtctcagaaatggccaatttaactttacagtaacaatagacagcacaacacaaactctctcaatacagataaactcacacatactggagatatatatataatagatatatataaaattattttaatgcattgtagtgtaatatttatgcatactatactgtataacatgttattcaaaagggattgccatttctgagacacagtaacaaaaaaatgaggaaattattttgcttctatttatagcctctgtcaaaagtcaaaagactataaatgctttgcaaaaatggtttcacgtttgcttaaatgcttcatcacagtcacattcaaaatagtgactctaaacaaagaagaaagcagcactgtcatcagatgcatgataaaccaaaatatgaaaatgggaaatgtttaattaacctagtaattgggtgggttaagtacatgggtgaattttatatgtgatttttgttttgttttgttttgttcagattaactgcttatagccttagaaagccttttacaaaattaaaaaaaaaatagatgtgcattcagtttttaagaatggaatcatccaaaggaattcctttttttgaggtttggatgttgcagctagtaaaggatatttttgctctgttcagcagttctaaaaattgctgaagtaggggccaggtcactggtagttatagtatggaatgggagaagtgaaagttcagttatagaactttccatacttccaagtttactgcaagtttttatgcttgagagagatgctttctaatataagactgatgtgttgattttactgattgtactgtacatctattaaagccttagattattacattacgggttggaacccataccaatgtaatttcaatcgtgttaagaaagtaatggtgacttcacatgttattgtagttagttacattatagaatattacttatttttcttgttaaaatgtagtttttcatttcctacatttattagattttcattttctattaacaattgaataccatttcagtttatagacttgttttattagattttaccaatgaatttttcaaaatacaaaaaaaagtagtttttccttcataacatactcagttttgaattacatgtagtgtcacatgaatattcgtattgttaactaaatgatttatattttactgatttaatattacagtgtaagaatgtcagtcattgttagttcttgtctagttttcattaaaagaacaaagatcttttatatggatatcttataaatatataatcattgctaagtaagaagttaagttgttgctatcgcaacaatcctggcagacaattgagtaatattttgatgatttattttgtttgtaattagttattataagaagatctagatcctagatattagaataaaatttattttctactgtatccatttcaaatgttaaaatattgtttaatatttttgaaatccctgagtatcaggccttgttataaataagctgcataatcaataaatagaacaagggactttttgttgataatccaaatactcaaagtttacgtaatgaaaattatagcgtgtgtgcaaactcttgagggttgattatgctgcaatttagcatgttggaacgtctagggagaaggttgactttttgcacttctgtatatagtcaaaagagagaaacctgtataatagtaagatcttattttgaataaaaacgtctataattacaaggagttttgttaaggctaatacaatgacagactgagcaaaattgcttgcaaaagtggcacagagttagcactccataccccttcaaacatgttgctttgctttcttgtggacagcttgtagtttgccaggattttttcagctggaaagatacgccatcctttcaaaccctcatgactgacaaaaactccatggggccaaatctgcctgaagatcattaccaaaaatagcaggtacttctaccattaaggtgaaatcatggatcagatattccttacatttttcaaaactactgcatgtttaaaacttcaacaaaaaaagagagaaagaactatactaagaacatatattattcagatcagtttctgccaatttcagtggtttattgttcacaaaaaaatcttcaaaacaagtattgactttcacaaaatttaaatcataaacaggcaaaccaaacagcacactgtagctatagttgttatgtgattgttttttaattgctgtaggatcctgttctttcagcaggtgaaaaataaaacgcagttcaaatttcatggttttaattttcaactcagaagcactcaaaaatgcaaaatgtgataatgggcacttgtttaaaagaattagtgtatccagccttcactccagctggttaaaaatgttgcacttatcagcaaccctaccactttcatctgctgaaaggacaaatgtgcttggttttactattatgtaatcacaacttactttctgcttgtagttgcttaaaattatgtattttgtcttgggctgcaatttgttttatgcttattttattattactgcagtagttgactttgctgtatggaaaaataaagtgaaattgccctaataaaacttctctttcttaagt

SEQ ID NO: 396 - DNA, 110 bp, Homo sapiens
gtgataatgtagcgagattttctgttgtgcttgatctaaccatgtggttgcgaggtatgagtaaaacatggttccgtcaagcaccatggaacgtcacgcagctttctaca

SEQ ID NO: 397 - DNA, 110 bp, Homo sapiens
tgaacatccaggtctggggcatgaacctggcatacaatgtagatttctgtgttcgttaggcaacagctacattgtctgctgggtttcaggctacctggaaacatgttctc

SEQ ID NO: 398 - DNA, 1851 bp, Homo sapiens
agggacccacgtgggagcctgggagcgggtggtcgtagctcggtagtccagttgtgggtaatcggggctgtttgttcctgtccgagagagctcggcggagacggctgtcgagtacccttcacctcggtgttgggagcctgggagcgaactgcggcgcgggttaccgctcccggggacgcagcaaggggcatcgagtccctggcgggagctgcgccatggcattgctctcgaccgtccggggcgcgacctggggtcgcctcgtcacccgtcatttctcccatgcagcgcggcatggggagcggcctggtggggaggagctaagccgcttgctgctggatgacctggtgccgacctctcggctggagcttctgtttggcatgaccccgtgtctcctggctctgcaggccgcccgccgctctgtggcccggctcctgctccaggcgggtaaagctgggctgcaggggaagcgggccgagctgctccggatggccgaggcgcgggacattccagttctgcggcccagacggcagaaactggacacaatgtgccgctaccaggtccaccagggtgtctgcatggaggtgagcccgctgcggccccggccttggagagaggccggggaggcgagcccaggcgacgacccccagcagttgtggctcgtcctcgatgggatccaggatccccggaattttggggctgtgctgcgttccgcacacttcctcggagtggataaggtcatcaccagccggagaaacagctgcccgctcactccagtagtcagcaagtccagcgcgggggctatggaggtgatggacgtgttctccactgatgacctcaccggatttttacagaccaaagcccagcagggctggctcgtggccggcacggtgggctgcccaagcacagaggatccccagtcctccgagatccccatcatgagttgcttggagttcctctgggaacggcctactctccttgtgctggggaatgagggctcaggtctatcccaggaggtgcaggcctcctgccagcttctcctcaccatcctgccccggcgccagctgcctcctggacttgagtccttgaacgtctctgtggctgcaggaattcttcttcactccatttgcagccagaggaagggtttccccacagagggggagagaaggcagcttctccaagacccccaagaaccctcagccaggtctgaagggctcagcatggctcagcacccagggctgtcttcaggcccagagaaagagaggcaaaatgagggctgacgtggactgtccacagtgttcatgtgctggagtcagggacggccgcacctgcctccgccggctccagtgtgcggggagcctctgcctgagtgtgcaccaggcccatgtttattgaccacagtctgggggggggggaaggggactgcggtggacaccagaggaagctgtttcctgttgtgatgttggacctgtagtaggacatggtgatttgttaatttccatgggaagccatgatggcctagcatggagggaatctgttcccaggccctgcctggaagttgagggaaagtttagacatctgcagagaggcaggcagcccagcccaggggacccgttcctcttgaaccagtcattgcctgtggcaaatgtgtgtatgagaatgtggggggtggagggcggggccctgatgtggagtagacagtgcgcacctcaggcccacacacggccccgccctggggccttgagcgcaggcctcatctttctgtgccgcgggactccgcacctacctcacagggttgttgtgaggctcaaataaaacatcactcagcacgtgggaaaaaaaaaaaaaaaaaaa

SEQ ID NO: 399 - DNA, 2945 bp, Homo sapiens
agcggttaggagggcggggcgcgtgcgcgcgcacctcgctcacgcgccggcgcgctccttttgcaggctcgtggcggtcggtcagcggggcgttctcccacctgtagcgactcaggttactgaaaaggcgggaaaacgctgcgatggcggcagctgggggaggaggaagataagcgcgtgaggctggggtcctggcgcgtggttggcagaggcagagacataagacgtgcacgactcgccccacagggccctcagaccccttccttccaaaggagcctccaagctcatggcctccttaggagcgaacccaaggaggacaccgcagggaccgagacctggggcggcctcctccggcttccccagcccggccccagtgccgggccccagggaggccgaggaggaggaagtcgaggaggaggaggagctggccgagatccatctgtgtgtgctgtggaattcaggatacttgggcattgcctactatgatactagtgactccactatccacttcatgccagatgccccagaccacgagagcctcaagcttctccagagagttctggatgagatcaatccccagtctgttgttacgagtgccaaacaggatgagaatatgactcgatttctgggaaagcttgcctcccaggagcacagagagcctaaaagacctgaaatcatatttttgccaagtgtggattttggtctggagataagcaaacaacgcctcctttctggaaactactccttcatcccagacgccatgactgccactgagaaaatcctcttcctctcttccattattccctttgactgcctcctcacagttcgagcacttggagggctgctgaagttcctgggtcgaagaagaatcggggttgaactggaagactataatgtcagcgtccccatcctgggctttaagaaatttatgttgactcatctggtgaacatagatcaagacacttacagtgttctacagatttttaagagtgagtctcacccctcagtgtacaaagtggccagtggactgaaggaggggctcagcctctttggaatcctcaacagatgccactgtaagtggggagagaagctgctcaggctatggttcacacgtccgactcatgacctgggggagctcagttctcgtctggacgtcattcagttttttctgctgccccagaatctggacatggctcagatgctgcatcggctcctgggtcacatcaagaacgtgcctctgattctgaaacgcatgaagttgtcccacaccaaggtcagcgactggcaggttctctacaagactgtgtacagtgccctgggcctgagggatgcctgccgctccctgccgcagtccatccagctctttcgggacattgcccaagagttctctgatgacctgcaccatatcgccagcctcattgggaaagtagtggactttgagggcagccttgctgaaaatcgcttcacagtcctccccaacatagatcctgaaattgatgagaaaaagcgaagactgatgggacttcccagtttccttactgaggttgcccgcaaggagctggagaatctggactcccgtattccttcatgcagtgtcatctacatccctctgattggcttccttctttctattccccgcctgccttccatggtagaggccagtgactttgagattaatggactggacttcatgtttctctcagaggagaagctgcactatcgtagtgcccgaaccaaggagctggatgcattgctgggggacctgcactgcgagatccgggaccaggagacgctgctgatgtaccagctacagtgccaggtgctggcacgagcagctgtcttaacccgagtattggaccttgcctcccgcctggacgtcctgctggctcttgccagtgctgcccgggactatggctactcaaggccgcgttactccccacaagtccttggggtacgaatccagaatggcagacatcctctgatggaactctgtgcccgaacctttgtgcccaactccacagaatgtggtggggacaaagggagggtcaaagtcatcactggacccaactcatcagggaagagcatatacctcaaacaggtaggcttgatcacattcatggccctggtaggcagctttgtgccagcagaggaggccgaaattggggcagtagacgccatcttcacacgaattcatagctgcgaatccatctcccttggcctctccaccttcatgatcgacctcaaccaggtggcgaaagcagtgaacaatgccactgcacagtcgctggtccttattgatgaatttggaaagggaaccaacacggtggatgggctcgcgcttctggccgctgtgctccgacactggctggcacgtggacccacatgcccccacatctttgtggccaccaactttctgagccttgttcagctacaactgctgccacaagggcccctggtgcagtatttgaccatggagacctgtgaggatggcaacgatcttgtcttcttctatcaggtttgcgaaggtgttgcgaaggccagccatgcctcccacacagctgcccaggctgggcttcctgacaagcttgtggctcgtggcaaggaggtctcagacttgatccgcagtggaaaacccatcaagcctgtcaaggatttgctaaagaagaaccaaatggaaaattgccagacattagtggataagtttatgaaactggatttggaagatcctaacctggacttgaacgttttcatgagccaggaagtgctgcctgctgccaccagcatcctctgagagtccttccagtgtcctccccagcctcctgagactccggtgggctgccatgccctctttgtttccttatctccctcagacgcagagtttttagtttctctagaaattttgtttcatattaggaataaagtttattttgaagaaagaaaaaaaa

SEQ ID NO: 400 - DNA, 5125 bp, Homo sapiens
cgagactcagccagaggagtacggattaagtggccgaagaaagaggagtgaggcaggggagcgaggcggacgctccgagcgcatcggactcacctgggccggcggcgaccggcgagtacgagtggactcttgccctccgcagcatgcgccccgcctgctaagtcgccgccgtctcgccctcacctagcaccgccaatcccgcctggatggagtcccctctgggttcccattggctcctgtgagtgcttgggtgtcgggagcctgtttttggcgaggggaaccaacttttgaagttcgcccagaagactgcgttccagccccagttccccggcagcgggacccggcgaagacgcgaccgcggcgcgagtcaccatgggaagcaaaggtgtctaccagtaccactggcaaagccacaatgtcaagcacagtggtgtggacgacatggtgctactgtccaagatcacagagaactccatcgtggagaatctgaagaagagatacatggatgactacatttttacatatataggatctgtattaatctcagtcaaccctttcaagcagatgccatattttggggaaaaggaaattgaaatgtaccaaggagcggcacagtatgaaaacccaccacatatctatgcccttgcagataatatgtacagaaacatgatcattgacagagagaaccagtgcgtcattatcagtggtgaaagtggtgctggaaaaacagtggctgccaaatatatcatgagctacatctccagagtgtctggaggagggaccaaagtccagcacgtgaaggacattatcctgcagtccaacccgctgctggaggccttcgggaacgccaagaccgtccggaacaacaactccagccgatttggaaaatactttgaaatccagttcagtccaggtggggaaccagatggtggaaagatctccaacttccttctggaaaaatctagggtggtgatgaggaacccaggagagcggagttttcacatattttaccagctcatcgagggcgcctctgcagagcagaaacacagccttggcatcaccagcatggactattattactacctgagcctctcgggctcatacaaggttgatgacattgacgacaggcgggagtttcaggaaactctgcacgccatgaatgtgattgggatctttgcagaagagcaaacgctggtgttgcagatagtggcgggtattctccacctgggaaacatcagcttcaaagaagttggcaactacgcggctgtggagagtgaagagtttttagcttttcctgcatatctgctagggataaaccaggaccggttgaaagaaaagctaacaagccggcagatggatagcaagtggggaggcaaatccgaatccatccacgtgaccctcaacgtagagcaggcctgttacacccgggatgcgctcgccaaggccctgcacgcccgggtctttgatttcttggtagattccatcaataaagccatggagaaagaccatgaagaatacaacattggcgtcctagacatctatggctttgaaatattccagaaaaatggctttgaacagttttgtatcaattttgttaatgaaaaactgcagcagatttttattgaactgacattaaaggcagaacaggaagaatatgttcaagagggaataagatggacacccattgagtactttaataataaaatcgtatgtgacctcatagagaacaaagtgaaccctcctggcatcatgagcatcctggatgacgtgtgcgccacgatgcatgcggtgggtgagggggcagatcagacgctgctccagaaacttcagatgcagattgggagtcatgagcacttcaacagttggaaccaaggcttcatcattcatcattatgctgggaaggtatcctatgacatggatggcttttgtgaaaggaaccgggatgtgctttttatggatctcatcgagcttatgcagagcagcgagctgcctttcataaagtctttatttccggaaaatctgcaggctgacaagaaagggcgcccaactactgccggaagcaaaataaagaaacaagccaatgaccttgtgagcaccctgatgaaatgtacgccccactacattcgctgcatcaagccaaacgaaaccaagaagcccagagactgggaggaaagcagggtaaagcatcaagtcgaatatttgggtctgaaagagaacattcgagtgagaagagctggctatgcctatcggcgcatcttccaaaaattcctacagaggtatgccattctgaccaaagccacctggccttcttggcagggagaggagaagcaaggcgtcctgcacctgctgcagtcggtcaacatggacagcgaccagttccagctggggaggagtaaagtgttcatcaaagcccccgagtctctatttcttttagaagagatgagagagagaaagtatgatgggtatgctcgagtgatacagaaatcatggaggaaattcgtggcccggaagaaatacgttcaaatgagagaagaagcctcagacctcttattgaacaagaaggagagaaggagaaacagtattaacaggaactttataggggattatattgggatggaagagcacccagaactccagcagttcgtgggcaagagggagaagattgatttcgcagacacagtcaccaagtatgacaggaggttcaagggtgtaaagcgagacctgctccttaccccaaagtgcttgtacttaatcggacgagaaaaagtcaaacagggcccagacaagggcctggtgaaagaagtcctgaagcggaaaatcgagatagaacggatcttgtctgtgtccctcagtactatgcaggatgacatttttattctccatgagcaagagtatgacagtttgcttgaatctgtcttcaaaactgaattcctaagcctcttagcaaagcgttacgaggagaagacccagaagcaactacctctgaaattcagcaatacgcttgaactgaagttgaaaaaggaaaactggggcccctggagtgcagggggctcccggcaagtgcagttccaccaagggtttggggacctggctgtcctcaagcccagtaacaaagtgctgcaggtcagcatcggacctggactgcccaagaactcccgtcctaccagaaggaacactacccaaaatacaggttattccagtgggactcaaaatgccaactacccagtgagagctgcccctcctcccccaggataccatcagaacggagtcatcagaaaccagtatgtgccatatccccatgctcctggaagccagaggtccaatcagaaaagcctgtacacctccatggcccgcccgcccttgcctcggcagcagtctaccagttcagaccgagtgtcacagacgccagagagcctggatttcctcaaggtcccggaccagggagctgcaggggtcaggagacaaacaaccagtcggcctcccccagcagggggcagacccaagccccagcccaagcccaagcctcaggtgccacagtgcaaggctttgtatgcctatgacgctcaggacacagacgaactcagctttaatgccaatgacattattgatattatcaaagaagatccttctggctggtggacgggtcgactacgaggcaagcagggcctgttccccaacaactatgtgaccaagatctgaggtgcccgtgactctgacacatggggcagaggagctccaggcacagaccaggggaggggatatttaggggctccccttacaatccacaatgagcaattgcttctccaaggcctggagctattctggtaccttccccatggaggacactgaaaaggctgggttggggacagggagtatcactccataagtgatcctaaaaggtagcctcttcataggaacccaggaggacaaaaccaccatgcattaagatttatttattgtatttaaacctggtgagaggacaagtgaggtctgctcagaccttgtaggcttctatcaaaacagcaccctgcttgctcaccaggcctagagaatggctgtaggtggccgctgacaagtgcctttagttgaagagcacatttctttcatctctcttgtccatacctgatagacacattcctctctgccaccttccttcagggaggacccgccctctgcagactgggcttagcgtgagcaggcacttcccatgtacgtgccaagggtaagctggcctgctgagcccagggcgacagaggggcactggtttacactttgccgggaccatcagggccgccaagcaggtcaggggctgggggctgggggctgggctgctggctttgctttctctgggtcttcaattagaatgtggctggcccatattggtttgtgtttaaatgctgtacttactacaagaaggatcttttttcaagctgtacatttataaaaacagatcatatactgtatatataaaaatcttgagatggtagaaacatgtatgaatgtactaagtagtattccactgtactcattcataaggtaggttttcttacaaaactcacaccaggtacttaaagatgtgctctgcttttttccaactacggagtgtcactgctttctaggtcagtccctgcagactcttctcaactctttccctataggaaacttactccgcgtcctgcccccacctcctaaataaataaaggaatcggcgaacaccttcttcttttatgacatttgttatgggttgaattgtgtgcctccaaagaagatgttggagtcccagccaccagtacctcacaatatgaccttatttggaaatagagtctttatggagcaaacaaacaaaactaattaaaatgaagtcattagagtgggtcttaatccaatataatggtgtcctgatgaaaaggggaaatttggacacagagaccaacatgccagaggaaagaccatgtgaaaaggcagggagaagacagccattcacaagccctggacagaggcctggaacagattctccctcacaccctcacaaggaaccagccctgcccaccttggtcttggacttccaacctccagaactgtgaggcaatacatttcgctgtttaagccaaaaaaaaaaaaaaaa

SEQ ID NO: 401 - DNA, 2725 bp, Homo sapiens
ctctcccagtctctaagccgcggcgtctccgcggccgagaggccccagcgcccgcctccccggcccccgcccccacccccgcccccggctctgcccacgccctccgcccgccagcccggcagccagcgcagctccgggcctcgctccctgtgcgtcctgcgggggcggaggcgcggagaggcggcaagcgcagccggggagggtgggggggcagaggcacagacagaggcgcggaggctcggagagagaagacgtggagggagggacagagcctggacagcggtggacacggcatcgtgcgcggggaagagggcagcacgcagcaggcgccgagcgccgggcaccgagaagggcagcccgggtgatctccggccgtccatgcacagagcgccttcccccacagccgagcagccgccgggcggaggggacagcgcccgccggaccctgcagcccagactcaagcccagtgcccgagccatggcactgcctcggacgctgggggagctgcagctgtaccgggtcctgcagcgcgccaacctcctttcctactatgagaccttcatccagcagggaggggacgacgtgcagcagctgtgtgaggcgggtgaggaggagtttctggagatcatggcacttgtgggcatggccaccaagcccctccatgtccggcgcctgcagaaggcactgagagagtgggccaccaatccagggctcttcagtcaaccagtgcctgctgttcccgtctccagcatcccgctcttcaagatctctgagactgcgggtacccggaaagggagcatgagcaatgggcatggcagcccaggggaaaaggcaggcagtgcccgcagttttagccccaagagcccccttgaacttggagagaagctatcaccactgcctgggggacctggggcaggggacccccggatctggccaggccggagcactccagagtcggacgttggggcaggaggagaagaggaggctggctcgccccccttctccccccctgcagggggaggagtccctgaggggactggggctggggggctggcagcaggtgggactgggggtggtccagaccgactggagccagagatggtacgcatggtggtggaaagtgtggagaggatcttccggagcttcccaaggggggatgctggggaggtcacatccctgctaaagctgaataagaagctggcacggagcgttgggcacatctttgagatggatgataatgacagccagaaggaagaggagatccgcaaatacagcatcatctatggccgtttcgactctaagcggcgggagggcaagcagctcagcctgcacgagctcaccatcaacgaggctgctgcccagttctgcatgagggacaacacgctcttattacggagagtggagctcttctctttgtcccgccaagtagcccgagagagcacctacttgtcctccttgaagggctccaggcttcaccctgaagaactgggaggccctccactgaagaagctgaaacaagaggttggagaacagagtcaccctgaaatccagcagcctcccccaggccctgagtcctatgtacccccataccgccccagcctggaggaggacagcgccagcctgtctggggagagtctggatggacatttgcaggctgtggggtcatgtccaaggctgacgccgccccctgctgacctgcctctggcattgccagcccatgggctatggagccgacacatcctgcagcagacactgatggacgaggggctgcggctcgcccgcctcgtctcccacgaccgcgtgggccgcctcagcccctgtgtgcctgcgaagccacctctcgcagagttcgaggaagggctgctggacagatgtcctgccccaggaccccatcccgcgctggtggagggtcgcaggagcagcgtgaaagtggaggctgaggccagccggcagtgagggttggactggtgtcttcagacccaggacctcagacttctggctcacacagacccccacgctctccatccccggaatctagtcacaaccctggatccttcctctgcccttctcctgcctccccacctgctccatgggcataagactgtggggcttcaagcaataacaagcagaggcctggagagaggacacaaggagggtgcgtggtgccctcacccctgcccagagcgagggggcaaggactctgcctccagggcatctggggttttcccctccctcacacaacacactcccattctctttaggtttgcaccagtggtgtgagcagttggactcagtttggacaagggggaaagggggacttccctgggaaggtccagctaaaagtggcaacatttgcccccagaattgggggcctgggaacactggacctgctccttctcccctctccttccccgtttttgtgcttctggtttgtttctttaattaatttaacaagtgctgcagtttgccctcccattcccatctatcccccaagtcctttgcaatttcttccctgccctacataggggcggtgggtgtgggatcccttcactggccccctcgggaggcctgggttggactcagggtctcctccagctgggggctggaccgcagcacctatctgagcagttagagcgtctttcttttcagattgtgtacagtagattatttattttgttattttggaataaaatttattttatggcttaggaaaaaaaaaaaaaaa

SEQ ID NO: 402 - DNA, 5363 bp, Homo sapiens
acggtctctgggcggagcaatccacactgctgagcctggggtggtttggaattcttcggcgaagtggagcgggctgagagtgggtttcccgtccccgagccctccctcatctcggagatgccgcacttgtgagcgacagggcttcatttgaattttcgcacctcgcgagttgcggagcctgcatctctgaagctgcctcggtgaagagccacagcattattttttttctctttgggagagtagctgtctgggatttgagatcctatcttccctgcaaattaccaggttgcatcttcactgataggaatacatttcttcaccaaaggacatggatgaaaatgaaagcaaccagtctctgatgacaagcagccaatatcctaaagaagcagtaagaaaacgtcaaaattcagcacggaattccggagcaagtgattcttctaggttttctaggaaaagcttcaaactggattatagactagaagaagatgtaactaaatccaagaaaggaaaagatgggagatttgtgaatccgtggccaacatggaaaaacccctctattccaaatgttctcagatggctgataatggagaaagatcacagcagtgttccaagttctaaagaggaactagacaaagaactcccagtgcttaagccatattttatcactaaccctgaagaagctggagtgagggaagctggcttaagagtcacatggctgggacatgccacggtaatggtggaaatggatgagctcatatttctcacggatcccatctttagctctcgtgcttcaccatcgcagtacatgggtccaaagcgatttcgtcgttccccgtgcacaataagtgaactccctccaatagatgcggtccttatcagtcacaaccactatgaccatctggactacaattctgtcattgctttgaatgagcgatttggtaatgagttgagatggtttgtgcctttgggtctccttgactggatgcaaaaatgtggctgtgagaatgtgattgagttggactggtgggaggagaattgtgtccccggacatgataaggtcacttttgtctttacaccttcccagcactggtgtaaaaggactctaatggatgacaacaaggtgctatggggcagctggtctgtcttggggccttggaatcgattttttttcgcaggagatactggttattgccctgcttttgaagagataggaaaaagatttggaccttttgaccttgcagctattcccatcggagcttatgaaccgaggtggtttatgaaataccagcatgtagacccagaagaagctgtaaggattcacactgatgtccaaacaaagaaatctatggcaattcactggggaacttttgccttagcaaatgagcattacttagagcctccagtgaagctgaatgaagctctagagagatacggacttaacgctgaagatttttttgtcttgaagcatggagaatcaagatacctaaataatgatgatgaaaacttttaataaatgtgagcacaggcacttttaatgaaaaaggcatcatctaagtttaaaaacaaatgaaaagacttagaaattcatgaatattgtgattattttacatttggaaacaacttctgcaagtttatgttttatgttttgtgtaataacttgcttcctagtatgatcagctcatgtacactatgagagggttcaggggtgggtcatttaaataatgaattggctaatgtggattttaaatttcatatcatgatataagcactgcaatggaaatgtttttactaaaacattatatttttgtggtactagaatttcctgaggtgaaaaaccgatattgaagattcatttttcttttttccattcttcaggaccttcggcaaggtgagtcaaggctctctacctacctagatgtttttcagaggcctacaaatacaagtatctttcttatatgcacattctaataaatgatgaaattcagtccaacatgcttattataaacatagcaattcttgctctatcaaattagcttatatgccaaatattaaatatggtttatttaggtaagcataaaaacataggggctatcatttttaaagacttgattttctctattgtggtaaaatatataaatacatatttgccattttaaacatttaccattttaaccatttttaagtgtacagttctttcgcattaatgcacccatgaccaccattcacttaaatttttaaaagaacagtatattctttttttcctagagccttcagatgagagggaacagtatattctattgcacgtctacaattcccaaaagacctcttactttgggaggccaaggtgggtgggtcacttgaacccaggagtttgacatcaacctgggcaacatggtgacctcccgtctctctcggaaaaaaaaaaagaaaaaagaaaaagccgggtgaggtggtgtgtacctgtagtcacaggtacttgggaggctgaggtgggaggatcacttgagcccaggagatagaggctgcagtgagctgtgatcgtaccactgcactccagcctgggcgacaaaatgagaccctgtctcaaaagaaagccctctccttagctgagcagaggaagggaaggagtgtggctatgagaatatgatttatgccattttctgtttttaaatctagaagatcttctaagcacaaatacagctacaatgaaatattttacagacaaaatgttaatagaccatattctttgaattaaatttgtttttaattttctctacacattttttttttcctggagtctcttagctctaaatatatcaatcagatttataattttttttacctgattcagatgtcttacatttttatattaaatgaaccttaagcatgattcttttggtaagccagtatgaatgccagtggttggggggcggggggggagtcagttgacataagatttagtcctaataaggactctgtattcacttgattattctgacccttcctaagggagggaggtggattagataccactggaggcccattctgtattcctaatccagtctcagcactttattcatacaaaataatcaaaataggttttctacaccaaatgctacccaggcagtgctctataatttatttgcacacctgtatgtgtggtgccacgttagccactaaatctgaacttttaccctgctttcatcatggatttttttgtgtaacctgaaacaagtcaccagtgctcactgtgcctgtttcctcatttgcaacaagaggataattccgacctacctctgaaaaatgtgtagattaaatgagtttttaaagcactttagaaaatataagggagaaaatgatttcttaagatatcactgcctaatatagacaggtatatttgaaagctaaatacaggttaatgcttttgataatgtattgttcctgttgcaaatttaagcattatatattaggagactaaacattgaaaactttcactgatttttaaattggagtaatagcctaaataagtgtaaataatctttatcaaaatttagtgtttatctacaaagatgcgaatcagtcaaggggaaatgtgtatgcaatgtgtgtgtatatgatgtatgcgaacatatgtgattttggggtactaaagcacaaaaaaatcccccataaaataaaccttcctgaaaagactgatcataaactttttcactccaagcagatgtgaatcaagatgttaggtttatggtgagttagctttgaggtgtgttgccctaatactagccagcgttgttgtagccatattccctgctgctgcacgccgaattgaaaatccatctcttacctcttctctatgaagcaagccaggtatgtcttgcttaagtatttcttctccatgaatggccttaacattattttgtattcacgtgtactgtttaactgagggtctcaaagcactttaaactgttgtgttctatttccactcgtctggcctgcctcatttttctaggcccttttgtaagctgtaattttttattaccactcatgttctttctacactgacactattcattaagaacatcaagcttcatctctgcttacagaatctcaccttattgagtgggttccactttatttttcatttgttatctacattttgaagggtttatgtgcaaagtgaaaacaaattttgaaaaataagacaaatccattctcttcttcaattcagtctaatatgcattgtagtgtcttttaatcagtcttatcctctaagtcaacttcattttcctcttcgtgaatacccatagcaatatgtaagattttattgaagtttcctgtgataactgaggaatactttgctatgcctcactgcccaatagggtgggtcatcaattaggagaaatcccaaattataaaagccaacatatgccgtgacctacgtaggaaaagatgtatttgtgcatcttctttctgggtagttaaaaattactccctcttttctctagcattttgacatttcagactcaatgctctgatctctagggagtgtgattattcaaactaatgagaggacaagaagacacagttttagaatctactgctgctaaagcacattaaaaacaaatcctggtttttaatgtatgcatagtttcatatttaatgaatatgctttcattaaatagggaggtagatttgaaaaaaccgttataaagaaatgtgccttttggggaatgaatacttttgttcatgtctagcccactgggaattttgttttcaccttatactgagtcctttttctaatgtaaaaatatttcttccaagtttgatttctgtatcagggtaacattgagaacacacatatttctgtttgaggatttgtgacttcctatggaaacagtcttgcatctatgtatttacaaatgaaatttaaagtattcttaaagctttgccttaaatactgcttgcatactgatttacttaatgctaagcatggcaggggttataaatttaaatactataagacctggctgaatcccagatgtatcaataaattgttatagtagcttatggaaaatgctattaaagataaattttcatacattgtatttttagtcaagtaaaatatggatgaaaattaataaagtactgtcaagggaaaaaatatgtataaccttgtaagtgatttttctcccctttattaaaaaaagattatacaatttgggctcatattaaaaaattcaaacagtagaacagtgtgtacgtagaaggcattccccactcccactccaggagtttgggtatcattctagaagtgttctgtcaatacataagcatttttcattcaaacacacacacacacacac

SEQ ID NO: 403 - DNA, 4318 bp, Homo sapiens
agagcagcgacagagccttcctcaaacctgtagtgactgccacactttgcaaggacaccgtagagggggcatgtccgcgctccaacttcctcccgacgcagcctctgattggctcctgggcttataagaaacgcgtgaatgagcagctgccgcgggcagaaagttgccggaggtctccgggtggtatcgccctttcctctttgccagcccgctggcgagccgagccagggcaagatgaggtcgtcctgtgtcctgctcaccgccctggtggcgctggccgcctattacgtctacatcccgctgcctggctccgtgtccgacccctggaagctgatgctgctggacgccactttccggggtgcacagcaagtgagtaacctgatccactacctgggactgagccatcacctgctggcactgaattttatcattgtttcttttggcaaaaaaagcgcgtggtcttctgcccaagtgaaggtgaccgacacagactttgatggtgtggaagtcagagtgtttgaaggccctccgaagcccgaagagccactgaaacgcagcgtcgtttatatccacggaggaggctgggccttggcaagtgcaagtgcgtcctggtcaccttcagatgaaatcaggtattatgatgagctgtgtacagcaatggctgaggaattgaatgctgtcattgtttccattgaatacaggctagttccaaaggtttattttcctgagcaaattcatgatgttgtacgggccacaaagtatttcctgaagccagaagtcttacagaagtatatggttgatccaggcagaatttgcatttctggtgacagtgctggtggaaatctggctgctgcccttggacaacagtttactcaagatgccagcctaaaaaataagctcaaactacaagctttaatttatccagttcttcaagctttagattttaacacaccatcttatcagcaaaatgtgaacaccccaatcctgccccgctatgtcatggtgaagtattgggtggactacttcaaaggcaactatgactttgtgcaggcaatgatcgttaacaatcacacttcacttgatgtggaagaggctgctgctgtcagggcccgtctaaactggacatccctcttgcctgcatccttcacaaagaactacaagcctgttgtacagaccacaggcaatgccaggattgtccaggagcttcctcagttgctggatgcccgctccgccccactcattgcagaccaggcagtgctgcagctcctcccaaagacctacattctgacgtgtgagcatgatgtcctcagagacgatggcatcatgtatgccaagcgtttggagagtgccggtgtggaggtgaccctggatcactttgaggatggctttcacggatgtatgattttcactagctggcccaccaacttctcagtgggaatccggactaggaatagttacatcaagtggctagatcaaaacctgtaaaggagcaaaacttccagaagcctcgagcccctcttgacctcctacacctgctttggaaagacatgcactttttagttgactaattcttcctcccattcccctctacttgcgagttatggaatttctattccataactgaagtctttatgataacctaatttttaaaaatgaatttgactaacttaagtgcaaaacatgtaaatttggttcccagagtgggccaatctctctgttcttgttatcttagccaactatactgatacctacagctacagaaagcaggactaggaactggaaataactttgggtcctgccttcattaggacgttctttttagaagcagttcttccagctctggatcatagagtgacctttaataagttaaaaaaacgaggactccttaattctgctagagttaaccttgagttcagagcagtattaaatgcgtgcactttcaggtcagtactggggaccaagtaccctctggtcttttgtgaatggatggttttgtttcctatgggaattttggcaaaggttttctggaaagaacaagtttctcaaaggactttcttcctctagaatgttcattttatgagatcgctatctgtaagtccagttggattacaggaatacttgaaagttactttctaccactattagaaaatatgaagtcgcatgcactggatatctatatatcattaggtttttgttgtgtttttggttatgctgtcccccttctccttggggagatatttgggagcaaacttatttagatttagagtaaacttttcattatagagcaagtaaaaacagacaaatgaaacaacctagtgtttcacataaaaatacttctgacataaagtaccaagagcagtgtgaatatacttggcatagtcaaaaaagaaaatacatttaatattagttcaaaattgttaaaaatacctttagaaggtctagtctattattgaaaactcaattttttcacttatatggctttaaaatggagctattttgctacaatataatgtattgtttatttttttaagttatttaatgttaatatacatagctagacttaaggtttttcagaaagatgtccataataaatattaaaaacaatggtattttttaaaaaactgccttagggttttaaaaccttccctacagttataaccacgtgtaattttgtggaaatgatataacagctattaatactactataacataggcataaatattttcgtgtttatatgcatatacaagttaaaataattagaaactatgactgcgcctagtaaagtcatctaggtttatagttcagtagcttaggcaaggcacacactgctcatctccgctttttagggtcagaggaacacaagctcatgttctgagtgaagggcgtacactggcacctggtgttgcctagatcccccatctcctccttccagccaggtctggaagtttcaacagcccaagcttaacttcatgtaaagtcttcactgccagtgggaacatctttgacacaacaagacactccaattgtgatttgagttgaggatctctgcctgccttcctgccgtccttccttcttccccgatccatgctacttttaggggctgcggagagcagcagcagagctgagtaatgatacagggcaccacggagagaaagtagaaccatttcactcctgggaagatggggtatttcccacttccagcaacgaaataacaaatgaaaagttgcatacttattgatgtattgtatgagccagtagcattttatgtacaaaacagaagtcaatgcaacagtatgtatgtgtgcctgtgtgtgtataaaaataaccattgaagctaacttgctaatgtacttaggcaagccacttcccatctctgggcctcgtctttcctccctctaaaatcaaagagctgaattatgtgatccttgaggtctcttccacttataataccaactgtcttgtcagactggcaaattatattggcctctccttatgtggtggtttttttggtaggtcatagttccttatacacagacacctgcatcatcgaaggtctttttttcctaaaaaaaaaaaatgggattttagttcttattctgtgataactatcctcctcatataatactattctttttgacaccatttgaaggaaccaatatttggaccttattttgaggttgtctgtctcgaagaaaaagaaaataaaatgtataggcagggttccttcaattggcattttccccagaattgtgagccaaagcctatagtaattgcagacagcaaatgattccggatctctaaaaggctctctcagatgaaaagggagtaaaggaaaaaagaggtcaaccactgtttctgataatgtacttgagtttcattgttcttttagtttgtattcttataaaaaatgtttacactctgcagattgattttttttttttagtactgtggctttcttttcctattttatgaaaaaaatgataatctttttgtaaaattgtctgtgaaatataaacattaatatataaagaaaaaccttgaagtgctgtatagtgaagtataaattaatgttttattgatttgtgaagaatttaagactattatataattatcttggtggatctattttatgcatgaccttttaacctttgactttgcttatttcccactacgaaggggaaggtagattttatgaatgattttaatagcaaatatattttataaagtgaaaatccagtgtggaggtagcaaagcatctatctattctgaatcatgtttggaaataaaattgctccatctgggaatgtgctttcaaaa

SEQ ID NO: 404 - DNA, 2442 bp, Homo sapiens
gtgcgtcacagaatggcctcggacacccaggcagtccctgacgtgtcggggaggagccgggcgcggaggtacgctgagtggagctcggggctgcgtaggggagctgagccgagcggctgggcgggcctggccgggccagcggaggggagacgtcggttgagcggcggcgaacatgcgcttttgacacattggaggctttcttgatcatggatggtgaagatataccagatttttcaagtttaaaggaggaaactgcttattggaaggaactttccttgaagtataagcaaagcttccaggaagctcgggatgagctagttgaattccaggaaggaagcagagaattagaagcagagttggaggcacaattagtacaggctgaacaaagaaatagagacttgcaggctgataaccaaagactgaaatatgaagtggaggcattaaaggagaagctagagcatcaatatgcacagagctataagcaggtctcagtgttagaagatgatttaagtcagactcgggccattaaggagcagttgcataagtatgtgagagagctggagcaggccaacgacgacctggagcgagccaaaagggcaacaatagtttcactggaagactttgaacaaaggctaaaccaggccattgaacgaaatgcatttttagaaagtgaacttgatgaaaaggaatctttgttggtctctgtacagaggttaaaggatgaagcaagagatttaaggcaagaactagcagttcgggaaagacaacaggaagtaactagaaagtcggctcctagctctccaactctagactgtgaaaagatggactccgccgtccaagcatcactttctttgccagctacccctgttggcaaaggaacggagaacacttttccttcaccgaaagctataccaaatggttttggtaccagtccactaactccctctgctaggatatcagcactaaacatcgtgggggatctcttacggaaagtaggggctttagaatccaaattagcagcttgcaggaattttgcaaaggaccaagcatcacgaaaatcctatatttcagggaatgttaactgtggggtgctgaatggcaatggcacaaagttctctcgatcagggcatacatctttcttcgacaaagggcaagaaaaagtcatatttcccacgttgttcatggggcagtaaacggctttgaccccgctcctcctcctcctggtctgggctcctcgcgtccatcgtcagcgccgggtatgctgcctctcagtgtgtgagtgcctagcctccaggtgggggctcctgccctcctccaacaacccaggacacccacgcctcacccctcggtgcctgggcccagccccgtgcccctccgtctgcctccgcacggctggcagagggcaggctgcatgcagtggcggctactgggccctgcccagccccggaactctgcgcgatatcaatactggctattttctcttctcgccgtagtgccgttggtttcacatgattgcacttttgtgggtcgcaaggtgatacatacgtgtattacttggtcactggatgcagaagtacccattcatcacacctgccccatagcccccactctgctgtactgataggatttagttgtgttttaggacattgcaaatcttctagaagttctcccccaaatcaggtcaatgtgtgccctcctgagctcccacccaggcatctccagtgctcatgatcatgtgtcccccaactccacccctcacagtttgggcctgtttctggcaaagagtcaggaaggttactgaattagggaacattttctgcaccttctgattttacttaagcagctaccattccatggacttgcctcccagagcagcacaatgcccgtctgagccccacgtggcaggagcctctgggacggggcacacacaggcccagcctctgtgctgtctcctcctccgtgcgcctcagactcggggtgagggaggcgggcagcctctcgccagccttcccgtccttcagttcaacgacatctttggagtgtttttgttttctcttccaagggccgtcccgttgtgttaggaagggtgagtggctggttccagggtgggccggtgccagctccggggtggactgaacagcggcggctgtccctgtgcatcctttgattactctcatgctgcatttactgtttacatttgttttattgtacataggtttgtaaacattattgcctgagatatttgtatataacttgggctttgtagcttttatttattcagaacgcatacggcatgttaatgactctgatggtgtcctcctctgggcagctgtataggatcatcatgtggttacaaaaaatacttccctcaaaaaaattcttttaatgtggaaacaataaatttcacagaaaaaaaggattgacgttgctttaaaaaaaaaa

SEQ ID NO: 405 - DNA, 2748 bp, Homo sapiens
cttttcgttgccgttacctgtttccggcagtcgacacgctcttcgcttctcggggcttgtctccgtgtcctccgtctcagttgtttctccctctctatcctcctctgtctcagtctccccagccttggggccggtgcctcttccgggcttcggcgaatgagacctgcggacctgcccccgcgccccatggaagaatccccggcgtccagctctgccccgacagagacggaggagccggggtccagtgcagaggtcatggaagaagtgacaacatgctccttcaacagccctctgttccggcaggaagatgacagagggattacctaccggatcccagccctgctctacataccccccacccacaccttcctggcctttgcagagaagcgttctacgaggagagatgaggatgctctccacctggtgctgaggcgagggttgaggattgggcagttggtacagtgggggcccctgaagccactgatggaagccacactaccggggcatcggaccatgaacccctgtcctgtatgggagcagaagagtggttgtgtgttcctgttcttcatctgtgtgcggggccatgtcacagagcgtcaacagattgtgtcaggcaggaatgctgcccgcctttgcttcatctacagtcaggatgctggatgttcatggagtgaggtgagggacttgactgaggaggtcattggctcagagctgaagcactgggccacatttgctgtgggcccaggtcatggcatccagctgcagtcagggagactggtcatccctgcgtatacctactacatcccttcctggttcttttgcttccagctaccatgtaaaaccaggcctcattctctgatgatctacagtgatgacctaggggtcacatggcaccatggtagactcattaggcccatggttacagtagaatgtgaagtggcagaggtgactgggagggctggccaccctgtgctatattgcagtgcccggacaccaaacaggtgccgggcagaggcgctcagcactgaccatggtgaaggctttcagagactggccctgagtcgacagctctgtgagcccccacatggttgccaagggagtgtggtaagtttccggcccctggagatcccacataggtgccaggactctagcagcaaagatgcacccaccattcagcagagctctccaggcagttcactgaggctggaggaggaagctggaacaccgtcagaatcatggctcttgtactcacacccaaccagtaggaaacagagggttgacctaggtatctatctcaaccagacccccttggaggctgcctgctggtcccgcccctggatcttgcactgtgggccctgtggctactctgatctggctgctctggaggaggagggcttgtttgggtgtttgtttgaatgtgggaccaagcaagagtgtgagcagattgccttccgcctgtttacacaccgggagatcctgagtcacctgcagggggactgcaccagccctggtaggaacccaagccaattcaaaagcaattaattggcttaggacccaatttccatagatgcaaatggcagttacagacaggttaacagaagctactgaagtctacagataatcaaaaaacttaatattctgttccctaccttttttcacttttcctcctccaaagagcaaaatgaaaattttgccttagctactgcagtggaaagagcactgaactaggagttggaagacaaggatgtggtcctggctctgccactggcttgcttttggaccttggatgtgtcacctgaactctctggacctcaggtttccatctgtaaaatgagagtattggttctaagatttctcatcttctcatccctaggacaagcatagtgcctgcatgcttcatgatcagtaagtcctggctgcataaaggactctgatgtcaaaatggaaaccaggggacttaccttttcacatgacttacccctcatccgagtgtgaggttacaagcaggtgtcatggcaggaaggaagaccagatctgtatgatttgttccatttttaataacaaaaatatccacacccttttaataatgctcagttctgtaggctctctatcctagaggaattgagcaaaacagaagaatcatgaagtctcctaccttctacagccttgtagttctgcttaccttctcttcctcatccagaaagcatcattttctagggagaacaatgagaatctcaatgccagtagtactggataatagtgcgtattgcttctggtggcattaccctgatgatgggctgaagttcatttattagggtggttcctgatgggaaaaggacatggattaggactttaaaacactggacagaatttcccacagtctttgccctcaaggagttcaccagtttatggggctagaagagcgagaaaattcaagaaaataaatgtagctggtgggagactttgtagatgttgggctatatgttggggtgatggtagctcctgatgtaattttcttagttgcatcttcaatatgcctggagtcgtctgtccaaggcttgtccaggcttctgggtttctctcaagtttgtttttctcaggatattgtcctggcccagctactcctttacctgtgagaagatcttcaccattaggaagatctctagacccccagatctcagaatcaggcctatttgtgtaggcccatggaaatcactacttgtgaagtagagatgcctttttgtctaa

SEQ ID NO: 406 - DNA, 13369 bp, Homo sapiens
agattcctgtcagcggcggcggcggtggcggcgaccgtcagttttcgctgaggagaaacacgaaacggaccctttggctctcccccttccccttccccgtcctgaacccctctcctggtcaccgagaatcagtccccgtggagttccccctccacctcgccatcgtttcctcggtcctcggcccagtggaagtcactaccctcgaggaggaggcagcggcagccgccctcgcgtcgccgcccccggttcggtgcccgcggtcccggagaggaggtgccgccgccaccgccgctccccccctcccgctgccctcgggccgggctgggtcgagctgcgatgccctcggacttcatctcattgctcagcgcggacctagacctggaatcgcccaagtccctctactcgcgagattctctgaagttacacccatcacagaattttcatagagctggactattggaagaatctgtctatgatcttctcccaaaggagttacagttacctccatctagagaaacatctgtagcatcaatgagtcagacaagcggtggtgaggcaggctcgcctcctccagctgttgttgctgctggatttgcctctgaagcagggagtgtctgcattaaaaatgacctgtagttctctgcttcatagatgcttcttcagctccctcctcttcctccatgggcggtgcttgcagctcctttaccacctcttccagccctaccatttattctacctcagtcaccgacagcaaggctatgcaagtggagagctgctcctcagccgtgggggtaagtaacagaggggtaagtgaaaagcagttaaccagtaacacagttcagcagcatccatcaacaccgaagaggcacacagtcttgtacatctcaccaccacctgaggacttgctggataacagtcggatgtcctgccaggatgaggggtgtggattggaatctgagcagagctgcagtatgtggatggaggattccccctccaacttcagtaacatgagcaccagttcctacaatgataacactgaggtacctcgtaaatcacgaaaacgaaatccaaagcagaggccgggggtcaaacgacgagattgtgaagaatctaatatggatatatttgatgccgacagtgccaaagcacctcactatgtgctttctcagcttaccacggacaacaaaggcaactcaaaagcgggaaatggaacattggaaaaccaaaaaggaactggagtaaagaagagccctatgttgtgtggacaatatcctgttaaaagtgagggaaaggagctgaagatagttgtacaacctgagacacagcaccgagctcggtacctgactgagggcagccgtggctcagtgaaagatagaacacagcaaggctttcctacagtaaagctggaaggccataatgaacctgtagtgttgcaagtgtttgtgggcaacgactctggacgagtgaaaccacatggattttatcaggcctgcagagtaactggacgaaatacaactccttgcaaagaagtggacattgaaggcactactgttatagaagtcggccttgatcctagcaacaacatgacactggcggtggactgcgtagggatattgaaattgaggaatgctgatgtcgaagccagaataggaattgctggttccaagaagaaaagcactcgtgccagattggtttttcgagttaatatcatgaggaaagatggctccactttgacactgcaaacaccctcttctccaattttgtgtactcagccagcaggagtgccagaaatcttaaagaaaagcttgcatagctgttcagtgaaaggagaagaagaagtgtttttaatcggcaagaactttctgaaaggaactaaagttattttccaagaaaatgtttctgatgaaaactcttggaagtcagaagctgaaattgatatggaactatttcatcagaatcatcttattgtgaaggttcctccctatcatgaccaacatataactttgcctgtgtcagtgggaatatatgtagtgacaaatgctggaagatctcatgatgttcaaccattcacttacactccagacccagcagcagctggtgctttgaatgtaaatgtgaagaaggaaatatctagtccagcaagaccttgctcttttgaagaggccatgaaagcaatgaaaactactggatgtaatttagataaggtaaatattatccctaatgccctgatgactccactcataccaagcagtatgattaagagtgaagatgttactccaatggaagtaacagcagaaaaaagatcttccactatttttaagactacaaagtctgttggatcaactcagcaaacattagaaaacatctcaaacatagcaggaaatggctctttttcatcaccatcatcttcccacctaccttctgaaaatgaaaaacagcagcagattcagcccaaggcatacaacccagagaccctgacaactattcaaacccaggacatctcacagcctggtacttttccagcagtttctgcttctagtcagctgcccaacagcgatgcactattgcagcaggctacacagtttcagacaagagaaactcagtctagagagatattacagtcagatggtacagtggttaatttgtcacaactgactgaggcatcacaacaacagcagcagtcaccactacaagaacaagcacagactttacagcagcagatttcatcaaatatttttccatcaccaaatagtgtgagtcagcttcagaatactattcagcagctgcaagcagggagtttcacaggcagtactgctagtggcagcagtggaagtgttgacttggtccaacaagttttagaggcacagcagcagttatcttcagttttattttctgctccagatggtaatgagaatgttcaagagcagcttagtgcagatatttttcaacaagtcagtcaaattcagagtggtgtaagccctggaatgttttcctcaacagagccaacagtccataccagaccagataatttattacctggaagagctgaaagtgttcatccacagtctgaaaacacgttatctaatcaacagcagcagcagcagcagcaacagcaagtgatggaatcttcagccgcaatggtgatggagatgcaacagagtatctgccaggcagctgcccagattcagtcagagttattcccttcaactgcttcagcaaatggaaaccttcagcaatcgccagtttaccagcagacttctcacatgatgagtgcattgtctaccaatgaggatatgcaaatgcagtgtgaattgttttcttctcctcctgcagtttctggaaatgaaacttctacaactaccacacagcaggttgcaacccctggcactaccatgtttcagacatcaagttcaggagatggagaagaaactggaacacaagcaaaacagattcagaacagtgtctttcagaccatggtccaaatgcaacatagtggggacaatcaacctcaagttaaccttttttcatccacaaaaagtatgatgagtgttcagaatagtggtacccaacaacaaggtaatggtttattccagcaagggaatgagatgatgtcacttcaatctggaaattttttgcagcagtcttctcattcacaggcccaactttttcatcctcaaaatcctattgccgatgctcagaacctttcccaggaaactcaaggttctctctttcatagtccaaatcctattgtccacagtcagacttctacaacctcctctgaacaaatgcagcctccaatgtttcactctcaaagtaccattgctgtgttacagggctcttcagttcctcaagaccagcagtcaaccaacatatttctttcccagagtcccatgaataatcttcagactaacacagtagcccaagaagcattttttgcagcaccgaactcaatttctccacttcagtcaacatcaaacagtgaacaacaagctgctttccaacagcaagctccaatatcacacatccagactcctatgctttcccaagaacaggcacaacccccgcagcagggtttatttcagcctcaggtggccctgggctcccttccacctaatccaatgcctcaaagccaacaaggaaccatgttccagtcacagcactcaatagttgccatgcagagtaactctccatcccaggaacagcagcagcagcagcaacagcagcagcaacagcagcagcaacaacaacagagcattttattcagtaatcagaataccatggctacaatggcgtctccaaagcaaccaccaccaaacatgatattcaacccaaatcaaaatccaatggctaatcaggagcaacagaaccagtcaatttttcaccaacaaagtaacatggccccaatgaatcaagagcaacagcccatgcaatttcagagtcagtccacagtttcctcacttcagaacccaggtcctacccagtcggaatcatcacagacccccttgttccatagctctcctcagattcagttggtacaagggtcacctagttctcaagagcagcaagtaactctcttcttatctccagcatccatgtctgccttgcagaccagtataaatcaacaagatatgcaacagtctcctctttattcccctcagaacaacatgcctggaattcaaggagccacatcttcgcctcaaccacaggctactttatttcacaacacagcaggaggcacaatgaaccaactgcagaattctcctggctcatctcagcagacatcaggaatgttcttatttggcattcaaaataactgtagtcagcttttaacctctggaccagctacattgcctgatcagttgatggccataagtcagccaggccaaccacaaaacgagggccagccacctgtgacaacacttctttctcagcaaatgccagagaattctccactggcatcctctataaacaccaaccagaacatcgaaaagattgatttgcttgtttcattgcaaaaccaagggaacaacttgactggctccttttaactggatataaattccacgaagaaaatcctgattccaagatgtcctgagatcttgtggttccatgagaattattactttaaaaacaaaacaaaatataaaaaactgtgtttgagtaaactgatagattttactctgactgcaaaagagcacacctatgctgcttgttgcagtaactaaccaccaatgttaacatcttcatattttatattcctaataacagtgatgactgagaatctatttgagtttccagctggcagaattaattgttattattttcctaggcgcaatttccttaaacgtacagtttaaattcaaggctggaccactcagttattattgctattagaaaataatatatcatgtttacttttgttcttcattattttctttcctgcattgttttagtcaagtaatggcttttgaaaaagtaaagttcaataataactaaggctgtgatttttttcaatataaaaggcacagctgttggccaaagtgaaggaatcttttttcagttttattggagaaactgaagggtaacattctaacaagtaaactgtatgtgcagataaaagtactcttgatttaacacaaaggcagatgatacacttataaaactgggaacagctggaatgcttcttgattttattttttcagagagttgttagttctctgggtttctactaaggggtttagccataactgtgcatagaaaaataattatctgtaaaaaatgaaggggataatatatgataaattatgttctgatatcctcctacagtagtttaaattgacagaaaaatttgaatgttttcttcttaacccagtcttaggctggtattccctttttatatatatctatattacttttcacctctttttcactttactttagagaactattaatatactactggcttcatgaccctgtagcatctttggccactttaatctagggtgacctagcaatcctgcagcacagggcagagagtactgtcttaggaattattaggagttgattcctgagaaacaacacatttttccccatgaacggtgctgttctgaagtcttcaaatttttccctctaataggaaacagtataaattttaattaaaaaaaaaaggcaaactaaaatttcttgaaatatcacttctccctgatctgcagtgagtataaattcacttgtcacctcagtgctttacagtttgaagtggtcacttacctgatggttcccacaagccttaggctttacagggttgtatcattgacttaaaatgaagaattaacttgtgttacatctataaagagcaaaataacacactccagaacttggcagttgtagcattagttatacagttttgggtgttcttgccacccgtgggatgcctgcttctcactaccacctgtgtctggacacatgcttatgtctcattttccttttggcatgtggaaagctgtcaatgcagtgtaaggccaacgtgtgtgtggcttctatgtgttgagataatgttttggtatccttgtccgtttcatttattttttaagtgtacaaaaaataacctgttaattgttgaaggctacttttctgttctttttttttttttttttctatcctgtacatttagttgaactgtgcggaattgtggtgttggttttgtttacacagccagatttttccttctttttgttttgtgatgatcttcctttgttctttgaatgtgctcttttgtctttttctcttttttctcatgttttcttccctccacctccacccctttctttctttctctctctgattgagaggcattgaattacgttttcagtagtacaggcttcttgccgatatgaagggaacttttcagaaagagacctactctgggtcatttaattttgaatacagttttcaatcgttcaagttttggatggtttatatctaatgtgtgtttcatttttttggaaagctatattttgtatttaggaaatggtatactattttgctatttgtactgagtgagtacattggcataaatatagaaatttatatatatacatatatataaactattcttttttgccacacatttttgtggtaaatttgtgagtttgtctgatgttctaccacaacgtggcgtctgataacagtgagggggggtggggtttgttatgtctttattgagtatttaagtatcttttgaaacaaatgacctgttcatctgtggccattccatcaggcagttagttccttgatgtcagtagtgggctaaaggcagcttactgtgtgtttgctggagctttcactcagccaagtgttagagtcaggaaacccattgaggcaatggcgtcaaatggtgtttcacaagaatgagccattcagtctttgctcactatatatttaatattttattattgttgttattgttattattaattggctttctgtattctatgccttttatttataaagacactaagaaaacccatgtttgtaattttaataacatttttcccatcttgtaatatccagagctactttataaattctctgaaccaaaagtattttcctcagtgtatctcttctcccccagcccctattgggaaaaattacccagtatagttcaggttatgaggaggatcagccacacaatccagtgcttcagtttgaaaatgtaaaattctaaccctaaagtagggttggttgaaatttcagacaaagcaaacccagcaggtataaaaagtagtataaatacaaatctgtaagttatttttgaattttctgaacttttttctaagagattacataggagactaaagaaatctatctgttcaagttctaattaggatgattgttaatactgcactgtggatgaagtggcgactggcttgtgtgctgacttctgtggtttagcaagaggtttattgttatcaaatgctaattggcaatgccaagtcactgggaccaattttctgttttataatatctaagtttagaacagaatatatacctgaactgtagtggtttgatcggatggagacagaaaacccgatttttattctcataaattttgtggttatttatacaagggctgtgctatgctaccatattcttgttcaataataataggtttgttgttttttttacattgttaaatgttccttacccctaaaggtcaatgttaagtacaacattctgaaaatacaatttggctacgaagagtattcatcttctttgaagctcagtggttgatatttgtgctaataatgcaatttcctgattactgttacaagttatagctacatatgggagagactcagtgagccagcaaaggccatagaaacaacaatttattaaatgtatttatggcagaaggacctaaataaactgtgagccaccttttcttctttatattgttacatttaagtgttcttgctttcagcaactcacattaatgcttggagcttatctctttctctctctctctctctctctctgtgtgtgtgtgtgtatgtgtgtgtgtgtgtgtgtgtgtttccttattgtcattccattatatatccacaccaacatgggtgacgataattcaaagtcatattttgcctctaagcttgatcatgttacctttatgattaaagtatcatgttatttagccaatgcaaatctgttttaaaacaaatagtttaaaaaaagaacaagtttttaagggctttattatagaagaagtattaatgaaggactttccttcctccctccctttcctcccctccctgcctcccttcttcccttccatctccccctcctccctgccttctttgtttctccttcccttattcctccctccctcctttctcccttccttcctttcttccattcatccttccttgccttttatttttattttttgtaatatcacatgtgctgtagtttggaattttattctagtgcatttcttgctcatcagaacctcagctaatctacctaggaaaaatagtatcaaaggaaatgagaaagttgtatctgagtccctccagaactaagataattctttttgaccatttaagcctttataaatgcgttttgaccatttaagcctttataaatgcttgttttaggaaagtgaatctgttagatgcatcaacaaataatgaccaggacaaaacgatttaataattaaagtctcaaatcaccatggttatacattttcaccagaaatagtaatcttacaatttttcatttttctgatgaagatttctgttccaatatctgtttcctaatagattttttaaattaattagctttcctctgctttatgaccacaggttttatccctaaccgagacagctgtcttatatctgcatgccttagactgtgtggagggactccatgaagaaagaccataggttagaaaaataactcatagtatataccctagtaagtgggttagtagaatctcataacatgtattaaaaagaggttttcttctctgcttgtttgtgtcactagagcaaaattgtagagataatgctcataatgcagtaaatatcagaataatatctacaatatcatttgtggatggtcccaggtcccagtgctctagttactttacttctttttttttttttgagatggagtcttgctctgtctctcaggctagagcagtgtgcgatctcagctcactgcagcctccacctcccaggttcaagcgattctcctgcctcagcctcccaagtagccaggattacaggcaccctccactaggcccggctaattttttttgtatttttttagtagagatggggttttgccatgttggccaggctggtttcgaactcctaacctccagtgatccacctgcctcggcgtcccaaagtgctaggattacaggcatgagccaccacatccggcctaattacttctttaatccccatttatttttatgccattctagcctcatttattaataaaattatgtttttactttctctttcaggaaattttttaaattaatattttatatctagatctaatgctatggaaaagtgcctttttatcatttataatttcatttttcactatttccaaaaacacataaacaaatagtttcagtaggtcccagcttttactttttccatttaaaccttcttttctccatttcttccctttggcttaagaataaaagaaaaggtacattgctagaattgtttctttgggagagggtaaaagattacagaattagactgttcagcctttatataaactaaatttgtcttcatctcaaccagctaatggtaggtcttatctgaatactcatgagaattttagcatctgtgaaactccatgcaccagatgtgtgtaaatttcaggaagaaagtgttgaaagcattttctctgatgttaattagatggaaataaatcactaaaacatagtttaggtaaagcctgattatgccacttttttttaactagacagggcaaagttgtttatgttagtgtacttcttgtctatcctcagttaatttacctagacaaaaagtgtcaaaggaaatgagaaaaaggttatatctgactccctccagacctaagataattccttttgatcagatacagtcagatggagtgccttggtttttgttaattttgcctctattccagctccttaccacagcggtggtgcttaaagaaaggatcatcagcaacaggtcaggatagttctacctttgggatagggctgctttccccgtgctagtatttctgtgactgttagtggcactgaggactgcaaacttttatgcaatattcttaataccctattgatattatgcactttaatcattccaaagaagccaagaatgctgtatagtgatgattccttcctaatgaattcatcttaactatttagaatgttatgtcccttttcttttggatagccaacttggtataaatgttatatggatttttctaaaatgactatataggacttaagactttgaaatgtaatttacttataaggggaaataattatgctttagcacatcattttagaaacgtcacattttagaaacattcagcttgctaacctacatgtttgggaattcattaaaaccagttgtctatatattttgtgccatgtatataagaacattacaatatatctttttctacatatgtagtatgtgcaaccagtggttctcagagtatggttctcagcccaccagctagtatcagtatcacctgggaactagttagaaatgtaaattctttggccccatcccagacatactgagtcagaaactctggaatagggcccccgcaatctgttttcacaagccctccaggtgattctgatgcacactttaaagtttaggaaccactgggctaagactctgttgagatatagagtttttcttccactcagactgatatagttatacattgttcttcatgtaaattcagcttaacctggttatctataatcttttattggcaaaagttaattctcagtactgcctatagagatacagtgtattttatgtacatacacaattagtctaattcttgataattcagttaatttagtttggcattttcctaccacttactaaaaggtttacattaaatgactgatttaaatatataggtgcaatgttctatgtttattttaattgttatgacatttaagtagctaatataattgaccggtgctaaagtctcctgtttatccataaaatgggtacattatgggcagtgtaatacaagctttcttttcattgcctagtactttaccagcagaccacagttttgccctggctagaccaaccctcagaacaaaatcatcattccttgtatttatatttgtatctgagatagtaaacaagatggctggccaggtcaacatggcaccttaacttatttttttaataggtaaaacttcttcaaaagtagcttgctttgtataagaactaagctatcagtatagatatagctatccttggagcttatgtttcagacaagaattatttactaaaataaataataaacaagataatgcattatacaatttgggcatttctcgtttctcaagtgtatgcatcatggtaaatataaactaaccacaagataggtagattgattcatttcattttaatctccttgtgtaattcagtacctccataattgttctaatcttcttcccactgtttacaaattaccagttaattaactcgtgaaagaaaaattcacatatcagaataaaaataaatgtatactcactttataaaaatcaccactgctgtctttccttaatactagcagtggaaatgtaagtggcttactctacaaattttggtgctggcaaatacataggcaaactgttgggagctgctctagttacattcctcccttcttattccctttttctcttcctcactttattgcataacatattcctgtacccaaagcattctaccacagttctatttgactcccacttgtaataactcctttaaaaaattccatgtttaaccatatgaccctgcttgcttactcatattctccctccctctccccttcctttctctctcttccagaagtcatttgcctggtttgaaatattttgtagggattgcttattatattattttagctgatgaacctcaggacaacgtctacacacacacacatacatacacgcacacaaaatctcagctgttgaagagtgggcttggaatcagacttctgtgtccagtaaaaaactcctgcactgaagtcattgtgacttgagtagttacagactgattccagtgaacttgatctaatttcttttgatctaatgaatgtgtctgcttaccttgtttccttttaattgataagctccaagtagttgctaattttttgacaactttaaatgagtttcattcacttcttttacttaatgttttaagtatagtaccaataatttcattaacctgttctcaagtggtttagctaccattctgccatttttaatttttatttaattttatttgcttgagcacactgatcaaccactgaactgccttcttccattgtcctgcaatgatataagggttacatttttgtgtatatggctttcatagttgggatttcagagcactgataccagatattttcagtttgttctctgggggaatttcatttgcatctatgtttttagctatctgtgataacttgttaaatattaaaaagatattttgcttctattggaacatttgtatactcgcaactatatttctgtaaacagctgcagtcaaaaataaaacactgaaagttttcattttgcagtggaaaaaaa

SEQ ID NO: 407 - DNA, 4093 bp, Homo sapiens
gtgagagagtgagcgagacagaaagagagagaagtgcaccagcgagccggggcaggaagaggaggtttcgccaccggagcggcccggcgacgcgctgacagcttcccctgcccttcccgtcggtcgggccgccagccgccgcagccctcggcctgcacgcagccaccggccccgctcccggagcccagcgccgccgaggccgcagccgcccggccagtaaggcggcgccgccgcccggccaccgcgcgccctgcgcttccctccgcccgcgctgcggccatggcgcggcgctgactggcctggcccggccccgccgcgctcccgctcgccccgacccgcactcgggcccgcccgggctccggcctgccgccgcctcttccttctccagccggcaggcccgcgccgcttaggagggagagcccacccgcgccaggaggccgaacgcggactcgccacccggcttcagaatggcagaagatgatccatatttgggaaggcctgaacaaatgtttcatttggatccttctttgactcatacaatatttaatccagaagtatttcaaccacagatggcactgccaacagcagatggcccataccttcaaatattagagcaacctaaacagagaggatttcgtttccgttatgtatgtgaaggcccatcccatggtggactacctggtgcctctagtgaaaagaacaagaagtcttaccctcaggtcaaaatctgcaactatgtgggaccagcaaaggttattgttcagttggtcacaaatggaaaaaatatccacctgcatgcccacagcctggtgggaaaacactgtgaggatgggatctgcactgtaactgctggacccaaggacatggtggtcggcttcgcaaacctgggtatacttcatgtgacaaagaaaaaagtatttgaaacactggaagcacgaatgacagaggcgtgtataaggggctataatcctggactcttggtgcaccctgaccttgcctatttgcaagcagaaggtggaggggaccggcagctgggagatcgggaaaaagagctaatccgccaagcagctctgcagcagaccaaggagatggacctcagcgtggtgcggctcatgtttacagcttttcttccggatagcactggcagcttcacaaggcgcctggaacccgtggtatcagacgccatctatgacagtaaagcccccaatgcatccaacttgaaaattgtaagaatggacaggacagctggatgtgtgactggaggggaggaaatttatcttctttgtgacaaagttcagaaagatgacatccagattcgattttatgaagaggaagaaaatggtggagtctgggaaggatttggagatttttcccccacagatgttcatagacaatttgccattgtcttcaaaactccaaagtataaagatattaatattacaaaaccagcctctgtgtttgtccagcttcggaggaaatctgacttggaaactagtgaaccaaaacctttcctctactatcctgaaatcaaagataaagaagaagtgcagaggaaacgtcagaagctcatgcccaatttttcggatagtttcggcggtggtagtggtgctggagctggaggcggaggcatgtttggtagtggcggtggaggagggggcactggaagtacaggtccagggtatagcttcccacactatggatttcctacttatggtgggattactttccatcctggaactactaaatctaatgctgggatgaagcatggaaccatggacactgaatctaaaaaggaccctgaaggttgtgacaaaagtgatgacaaaaacactgtaaacctctttgggaaagttattgaaaccacagagcaagatcaggagcccagcgaggccaccgttgggaatggtgaggtcactctaacgtatgcaacaggaacaaaagaagagagtgctggagttcaggataacctctttctagagaaggctatgcagcttgcaaagaggcatgccaatgcccttttcgactacgcggtgacaggagacgtgaagatgctgctggccgtccagcgccatctcactgctgtgcaggatgagaatggggacagtgtcttacacttagcaatcatccaccttcattctcaacttgtgagggatctactagaagtcacatctggtttgatttctgatgacattatcaacatgagaaatgatctgtaccagacgcccttgcacttggcagtgatcactaagcaggaagatgtggtggaggatttgctgagggctggggccgacctgagccttctggaccgcttgggtaactctgttttgcacctagctgccaaagaaggacatgataaagttctcagtatcttactcaagcacaaaaaggcagcactacttcttgaccaccccaacggggacggtctgaatgccattcatctagccatgatgagcaatagcctgccatgtttgctgctgctggtggccgctggggctgacgtcaatgctcaggagcagaagtccgggcgcacagcactgcacctggctgtggagcacgacaacatctcattggcaggctgcctgctcctggagggtgatgcccatgtggacagtactacctacgatggaaccacacccctgcatatagcagctgggagagggtccaccaggctggcagctcttctcaaagcagcaggagcagatcccctggtggagaactttgagcctctctatgacctggatgactcttgggaaaatgcaggagaggatgaaggagttgtgcctggaaccacgcctctagatatggccaccagctggcaggtatttgacatattaaatgggaaaccatatgagccagagtttacatctgatgatttactagcacaaggagacatgaaacagctggctgaagatgtgaagctgcagctgtataagttactagaaattcctgatccagacaaaaactgggctactctggcgcagaaattaggtctggggatacttaataatgccttccggctgagtcctgctccttccaaaacacttatggacaactatgaggtctctgggggtacagtcagagagctggtggaggccctgagacaaatgggctacaccgaagcaattgaagtgatccaggcagcctccagcccagtgaagaccacctctcaggcccactcgctgcctctctcgcctgcctccacaaggcagcaaatagacgagctccgagacagtgacagtgtctgcgacagcggcgtggagacatccttccgcaaactcagctttaccgagtctctgaccagtggtgcctcactgctaactctcaacaaaatgccccatgattatgggcaggaaggacctctagaaggcaaaatttagcctgctgacaatttcccacaccgtgtaaaccaaagccctaaaattccactgcgttgtccacaagacagaagctgaagtgcatccaaaggtgctcagagagccggcccgcctgaatcattctcgatttaactcgagaccttttcaacttggcttcctttcttggttcataaatgaattttagtttggttcacttacagatagtatctagcaatcacaacactggctgagcggatgcatctggggatgaggttgcttactaagctttgccagctgctgctggatcacagctgctttctgttgtcattgctgttgtccctctgctacgttcctattgtcattaaaggtatcacggtcgccacctggcattccttctgaccacagcatcattttgcattcaaattaagggttaagaaaagagatattttaaaatgagagtcacttgatgtgccattttaaaaaaaaaggcatattgctttttctaatgtggttatttctctgatttgcaaaaaaaaaaaaaaaaaaaatacttgtcaatatttaaacatggttacaatcattgctgaaaatggtattttcccccttttctgcattttgctattgtaaatatgttttttagatcaaatactttaaaggaaaaaatgttggatttataaatgctattttttattttacttttataataaaaggaaaagcaaattgatgacctcaaaaaaaaa

SEQ ID NO: 408 - DNA, 2581 bp, Homo sapiens
aatgaatgaatgaatgaatgagtgaatgaatcaacgaaggagtgagtcaaggcccgggaaccacagactccaagcctacgcagagcccgggaagggggattccggaggggcggggcctctttccggaagcgcccgccgggggcggggagggggcggggccatccgcgtgaggcgaccctgttggtccggaggggcggggcgaggaggaggacccgcttgggcggttcggctgcccacagtaaccgctgggtggacctggccagcgctccgaaccttgtcctcgctgcgcgccggcccctcggagccccacagcccgggaaggaggccgccgcgggccgggcgcccgctctgccaagcggacccgcaacccggaaaggcggcgcggcggagcctggagccggatcctgctcagaccgggccccggccggccagagccgcgggcatgtcggaggcgcggaaggggccggacgaggcggaggagagccagtacgactctggcattgagtctctgcgctctctgcgctccctacccgagtccacctcggctccagcctccgggccctcggacggcagcccccagccctgcacccatcctccgggacccgtcaaggaaccacaggagaaggaagacgcggatggggagcgggctgattccacctatggctcctcctcgctcacctacaccctgtccttgctggggggccccgaggctgaggacccggccccacgcctgccactcccccacgtgggggcgctgagccctcagcagctggaagcactcacttacatctccgaggacggagacacgctggtccacctggcagtgattcatgaggccccagcggtgctgctctgttgcctggctttgctgccccaggaggtcctggacattcaaaataacctttaccagacagcactccatctggctgtacatctggaccaaccgggcgcagttcgggcactggtgctgaagggggccagccgggcactacaggaccggcatggtgacacagcccttcatgtggcctgccagcgccagcacttggcctgtgcccgctgcctgctggaagggcggccagagccaggcagaggaacatctcactctctggacctccagctgcaaaactggcaaggtctggcttgtctccacattgccacccttcagaagaaccaaccactcatggaattgctgcttcggaatggagctgacattgatgtgcaggagggcaccagtggtaagacagcgctgcacctggctgtggaaacccaagagcggggcctggtacagttcctgctccaggctggtgcccaggtagatgcccgcatgctgaacgggtgcacacccctgcacctggcagctggccggggtctcatgggcatctcatccactctgtgcaaggcgggtgctgactccctgctgcggaatgtggaggatgagacgccccaggacctgactgaggaatcccttgtccttttgccctttgatgacctgaagatctcagggaaactgctgctgtgtaccgactgaagccaggcagggtctgggatcctcagggctccacctctccatctggaagccggagccataactgctgcagtttgggcccaggctatgtgctcttctggtgccctagggactgctgtggccagagcctggggccagccagtacagtcctgagccgaggaggagggactgcaagtggaagagagccagtctggaaggaagagctttccaggtggacagggcttcttggaagacccccaaagccccaggtatcctgggtgaagcctgtttgcctctcttgaaaatggcaggtgctcttgttttacccatgttgggtcagcctgaaactgccaaccagtaggaagcatggactctcctgagtgagaagagactgaaataggagcaagcagaaccctgagaggtgtcccatcttattgctgttgaggaccctgaaacaccgttgtttaaagacttcacacagaaggctctgaactgagccactggggaagggaagtttcagtaacatgacactaaaatggcagagacgttaaaaaaagtttttcccttctagagctgttttgcgcgcatgcatgtctgtgtgcattggggctttttagacaggcctgccctgtgactttgtggtagaggcagagagaaggaaattgtcccctgagcacggtagggccttgctgggtggggtcagaggccagtagttccaggcctttctctgtgtccagcacagacccttgtccttgctgtggaaatgatgagggatggagggacaagaggaagaatgagaggacacacgccctggagccctcaccactgccctgggggttgccatctggaggagcctggggataagggtaacccagggaggctgggcacgagggagctgactccacgtttttccccccgttcctcaccttcgagggccctgctaggtcacccctatgctggcatgaagagcatggggcaataaaccagcacagtctctgaccacttggagcgtctcatccagtgagagagacagccgttaaaagcataaacatccaaataaagatgcctttccaagtt

SEQ ID NO: 409 - DNA, 4721 bp, Homo sapiens
aacgcgccacacagattcgggctgcgcaacctctgtggccgtctacacggcgcgcagatgcgaatattctcgcggcgccggaagtccggggcacgtgacctggtgacagtgctgacttggctgtacagctcgatctaggttctgcggcacgggatggcggaggcgcctcctgtctcaggtacttttaaattcaatacagatgctgctgaattcattcctcaggagaaaaaaaattctggtctaaattgtgggactcaaaggagactagactctaataggattggtagaagaaattacagttcaccacctccctgtcacctttccaggcaggtcccttatgatgaaatctctgctgttcatcagcatagttatcatccgtcaggaagcaaacctaagagtcagcagacgtctttccagtcctctccttgtaataaatcgcccaagagccatggccttcagaatcaaccttggcagaaattgaggaatgagaagcaccatatcagagtcaagaaagcacagagtcttgctgagcagacctcagatacagctggattagagagctcgaccagatcagagagtgggacagacctcagagagcatagtccttctgagagtgagaaggaagttgtgggtgcagatcccaggggagcaaaacccaaaaaagcaacacagtttgtatacagctatggtagaggaccaaaagtcaaggggaaactcaaatgtgaatggagtaaccgaacaactccaaaaccggaggatgctggacccgaaagtaccaaacctgtgggggttttccaccctgactcttcagaggcatcctctagaaaaggagtattggatgggtatggagccagacgaaatgagcagagaagatacccacagaaaaggcctccctgggaagtggagggggccaggccacgaccaggcagaaatccaccaaaacaggagggccaccgacatacaaacgcaggacacagaaacaacatgggccccattccaaaggatgacctcaatgaaagaccagcaaaatctacctgtgacagtgagaacttggcagtcatcaacaagtcttccaggagggttgaccaagagaaatgcactgtacggaggcaggatcctcaagtagtatctcctttctcccgaggcaaacagaaccatgtgctaaagaatgtggaaacgcacacaggttctctaattgaacaactaacaacagaaaaatacgagtgcatggtgtgctgtgaattggttcgtgtcacggccccagtgtggagttgtcagagctgttaccatgtgtttcatttgaactgcataaagaaatgggcaaggtctccagcatctcaagcagatggccagagtggttggaggtgccctgcctgtcagaatgtttctgcacatgttcctaatacctacacttgtttctgtggcaaggtaaagaatcctgagtggagcagaaatgaaattccacatagctgtggtgaggtttgtagaaagaaacagcctggccaggactgcccacattcctgtaaccttctctgccatccaggaccctgcccaccctgccctgcctttatgacaaaaacatgtgaatgtggacgaaccaggcacacagttcgctgtggtcaggctgtctcagtccactgttctaacccatgtgagaatattttgaactgtggtcagcaccagtgtgctgagctgtgccatgggggtcagtgccagccttgccagatcattttgaaccaggtatgctattgcggcagcacctcccgagatgtgttatgtggaaccgatgtaggaaagtctgatggatttggggatttcagctgtttaaagatatgtggcaaggacttgaaatgcggtaaccatacatgttcgcaagtgtgccaccctcagccctgccagcaatgcccacggctcccccagctggtgcgctgttgcccctgtggccaaactcctctcagccaattgctagaacttggaagtagtagtcggaaaacatgcatggaccctgtgccttcatgtggaaaagtgtgcggcaagcctctgccttgtggttccttagatttcattcatacctgtgaaaagctctgccatgaaggagactgtggaccatgctctcgcacatcagttatttcctgcagatgctctttcagaacaaaggagcttccatgtaccagtctcaaaagtgaagatgctacatttatgtgtgacaagcggtgtaacaagaaacggttgtgtggacggcataaatgtaatgagatatgctgtgtggataaggagcacaagtgtcctttgatttgtgggaggaaactccgttgtggccttcataggtgtgaagaaccttgtcatcgtggaaactgccagacatgctggcaagccagttttgatgaattaacctgccattgtggtgcatcagtgatttaccctccagttccctgtggtactaggccccctgaatgtacccaaacctgcgctagagtccatgagtgtgaccatccagtatatcattcttgtcatagtgaggagaagtgtcccccttgcactttcctaactcagaagtggtgcatgggcaagcatgagtttcggagcaacatcccctgtcacctggttgatatctcttgcggattaccctgcagtgccacgctaccatgtgggatgcacaaatgtcagagactctgtcacaaaggggagtgtcttgtggatgagccctgcaagcagccctgcaccacccccagagctgactgtggtcacccgtgtatggcaccctgccataccagctcaccctgccctgtgactgcttgtaaagctaaggtagagctacagtgtgaatgtggacgaagaaaagagatggtgatttgctctgaagcatctagtacttatcaaagaatagctgcaatctccatggcctctaagataacagacatgcagcttggaggttcagtggagatcagcaagttaattaccaaaaaggaagttcatcaagccaggctggagtgtgatgaggagtgttcagccttggaaaggaaaaagagattagcagaggcatttcatatcagtgaggattctgatcctttcaatatacgttcttcagggtcaaaattcagtgatagtttgaaagaagatgccaggaaggacttaaagtttgtcagtgacgttgagaaggaaatggaaaccctcgtggaggccgtgaataagggaaagaatagtaagaaaagccacagcttccctcccatgaacagagaccaccgccggatcatccatgacttggcccaagtttatggcctggagagcgtgagctatgacagtgaaccgaagcgcaatgtggtggtcactgccatcagggggaagtccgtttgtcctcctaccacgctgacaggtgtgcttgaaagggaaatgcaggcacggcctccaccaccgattcctcatcacagacatcagtcagacaagaatcctgggagcagtaatttacagaaaataaccaaggagccaataattgactattttgacgtccaggactaagaagatcatgatgcacttagataaaagaatgattaggtatagtggagacttatttgccagcagataaatcatgcccgttcccctctgcctggcagaatcacagtctcacatactgtcttgtactgacacatccaaagcatgagtgtgtcagaaatcccttgtctattcctgtctgtataaagtgtttcattatgaccagatctctgattgtatggtcactaggtatgcaatcacgcattcaaagaggctctttacaccatcactgtgattgctctgagagttgagggactattgggctttatttggacaaaccaaacttttagcctgaaaccaactttatgccactaagtcatagcctcagttgtcccagttatttgtcctcctgaaaatgcctgaaacatcagacagacattgcttgctttacccaaactgatcaaaatctttaggagcacaaatgaattttttagtctgaaataccaaataatgaattggtataccatatccggaatcacacatgttatcttaaacccagccatcatacctaagtcttttgccaaaacctctcataggtatatctagctgaacttattttggcattttcaatgtgatcagttctagacctagaagggggtcaggctgctttacagaattctatttccttaagtccctggcacttctcataccacatcactgaacctgttcagtaacaatcagtttggccgtcccccatgatggtaggaaatatagagagcaagttcttctgccagggtcacactgtggtctctgaactgaccagtatatccctaactcctctttgatagagaaagagtctcaaatggacaactgtcctgtgttgctttccctaggccttcagcagcctattggctctccctgcctctgagctctggactctgtttgaatattccaagtagtatatggacagtccagggcttatgcccagcagcccactggaggcattcttcaggctcctttaaggcaggtgcattgatagttccattagtgtgacccttgcattggcacccctccagcctggaggccaggcttccagcaacttccttctgccctagagcaagccatgagccccagagcagtagcaggagacttgagaagtagagtgacaaaaacaagcacttaattaaattataaaatttaactttaaaaaaaaaaaaaaaaaaaaaaaaaaa

SEQ ID NO: 410 - DNA, 4827 bp, Homo sapiens
gaagggcaacacggggaccttgaagcggggtcgcggcggcgccccagcccgggccagggagtcccggcagcggcacctcccagaaagggcggagccgacgacgccttcttccttcctgaccggcgcgcgcagcctgctgccgcggtcagcgcctgctcctgctcctccgctcctcctgcgcggggtgctgaaacagcccggggaagtagagccgcctccggggagcccaaccagccgaacgccgccggcgtcagcagccttgcgcggccacagcatgaccgctcgcggcctggcccttggcctcctcctgctgctactgtgtccagcgcaggtgttttcacagtcctgtgtttggtatggagagtgtggaattgcatatggggacaagaggtacaattgcgaatattctggcccaccaaaaccattgccaaaggatggatatgacttagtgcaggaactctgtccaggattcttctttggcaatgtcagtctctgttgtgatgttcggcagcttcagacactaaaagacaacctgcagctgcctctacagtttctgtccagatgtccatcctgtttttataacctactgaacctgttttgtgagctgacatgtagccctcgacagagtcagtttttgaatgttacagctactgaagattatgttgatcctgttacaaaccagacgaaaacaaatgtgaaagagttacaatactacgtcggacagagttttgccaatgcaatgtacaatgcctgccgggatgtggaggccccctcaagtaatgacaaggccctgggactcctgtgtgggaaggacgctgacgcctgtaatgccaccaactggattgaatacatgttcaataaggacaatggacaggcaccttttaccatcactcctgtgttttcagattttccagtccatgggatggagcccatgaacaatgccaccaaaggctgtgacgagtctgtggatgaggtcacagcaccatgtagctgccaagactgctctattgtctgtggccccaagccccagcccccacctcctcctgctccctggacgatccttggcttggacgccatgtatgtcatcatgtggatcacctacatggcgtttttgcttgtgttttttggagcattttttgcagtgtggtgctacagaaaacggtattttgtctccgagtacactcccatcgatagcaatatagctttttctgttaatgcaagtgacaaaggagaggcgtcctgctgtgaccctgtcagcgcagcatttgagggctgcttgaggcggctgttcacacgctgggggtctttctgcgtccgaaaccctggctgtgtcattttcttctcgctggtcttcattactgcgtgttcgtcaggcctggtgtttgtccgggtcacaaccaatccagttgacctctggtcagcccccagcagccaggctcgcctggaaaaagagtactttgaccagcactttgggcctttcttccggacggagcagctcatcatccgggcccctctcactgacaaacacatttaccagccatacccttcgggagctgatgtaccctttggacctccgcttgacatacagatactgcaccaggttcttgacttacaaatagccatcgaaaacattactgcctcttatgacaatgagactgtgacacttcaagacatctgcttggcccctctttcaccgtataacacgaactgcaccattttgagtgtgttaaattacttccagaacagccattccgtgctggaccacaagaaaggggacgacttctttgtgtatgccgattaccacacgcactttctgtactgcgtacgggctcctgcctctctgaatgatacaagtttgctccatgacccttgtctgggtacgtttggtggaccagtgttcccgtggcttgtgttgggaggctatgatgatcaaaactacaataacgccactgcccttgtgattaccttccctgtcaataattactataatgatacagagaagctccagagggcccaggcctgggaaaaagagtttattaattttgtgaaaaactacaagaatcccaatctgaccatttccttcactgctgaacgaagtattgaagatgaactaaatcgtgaaagtgacagtgatgtcttcaccgttgtaattagctatgccatcatgtttctatatatttccctagccttggggcacatgaaaagctgtcgcaggcttctggtggattcgaaggtctcactaggcatcgcgggcatcttgatcgtgctgagctcggtggcttgctccttgggtgtcttcagctacattgggttgcccttgaccctcattgtgattgaagtcatcccgttcctggtgctggctgttggagtggacaacatcttcattctggtgcaggcctaccagagagatgaacgtcttcaaggggaaaccctggatcagcagctgggcagggtcctaggagaagtggctcccagtatgttcctgtcatccttttctgagactgtagcatttttcttaggagcattgtccgtgatgccagccgtgcacaccttctctctctttgcgggattggcagtcttcattgactttcttctgcagattacctgtttcgtgagtctcttggggttagacattaaacgtcaagagaaaaatcggctagacatcttttgctgtgtcagaggtgctgaagatggaacaagcgtccaggcctcagagagctgtttgtttcgcttcttcaaaaactcctattctccacttctgctaaaggactggatgagaccaattgtgatagcaatatttgtgggtgttctgtcattcagcatcgcagtcctgaacaaagtagatattggattggatcagtctctttcgatgccagatgactcctacatggtggattatttcaaatccatcagtcagtacctgcatgcgggtccgcctgtgtactttgtcctggaggaagggcacgactacacttcttccaaggggcagaacatggtgtgcggcggcatgggctgcaacaatgattccctggtgcagcagatatttaacgcggcgcagctggacaactatacccgaataggcttcgccccctcgtcctggatcgacgattatttcgactgggtgaagccacagtcgtcttgctgtcgagtggacaatatcactgaccagttctgcaatgcttcagtggttgaccctgcctgcgttcgctgcaggcctctgactccggaaggcaaacagaggcctcaggggggagacttcatgagattcctgcccatgttcctttcggataaccctaaccccaagtgtggcaaagggggacatgctgcctatagttctgcagttaacatcctccttggccatggcaccagggtcggagccacgtacttcatgacctaccacaccgtgctgcagacctctgctgactttattgacgctctgaagaaagcccgacttatagccagtaatgtcaccgaaaccatgggcattaacggcagtgcctaccgagtatttccttacagtgtgttttatgtcttctacgaacagtacctgaccatcattgacgacactatcttcaacctcggtgtgtccctgggcgcgatatttctggtgaccatggtcctcctgggctgtgagctctggtctgcagtcatcatgtgtgccaccatcgccatggtcttggtcaacatgtttggagttatgtggctctggggcatcagtctgaacgctgtatccttggtcaacctggtgatgagctgtggcatctccgtggagttctgcagccacataaccagagcgttcacggtgagcatgaaaggcagccgcgtggagcgcgcggaagaggcacttgcccacatgggcagctccgtgttcagtggaatcacacttacaaaatttggagggattgtggtgttggcttttgccaaatctcaaattttccagatattctacttcaggatgtatttggccatggtcttactgggagccactcacggattaatatttctccctgtcttactcagttacatagggccatcagtaaataaagccaaaagttgtgccactgaagagcgatacaaaggaacagagcgcgaacggcttctaaatttctagccctctcgcagggcatcctgactgaactgtgtctaagggtcggtcggtttaccactggacgggtgctgcatcggcaaggccaagttgaacaccggatggtgccaaccatcggttgtttggcagcagctttgaacgtagcgcctgtgaactcaggaatgcacagttgacttgggaagcagtattactagatctggaggcaaccacaggacactaaacttctcccagcctcttcaggaaagaaacctcattctttggcaagcaggaggtgacactagatggctgtgaatgtgatccgctcactgacactctgtaaaggccaatcaatgcactgtctgtctctccttttaggagtaagccatcccacaagttctataccatatttttagtgacagttgaggttgtagatacactttataacattttatagtttaaagagctttattaatgcaataaattaactttgtacacatttttatataaaaaaacagcaagtgatttcagaatgttgtaggcctcattagagcttggtctccaaaaatctgtttgaaaaaagcaacatgttcttcacagtgttcccctagaaaggaagagatttaattgccagttagatgtggcatgaaatgagggacaaagaaagcatctcgtaggtgtgtctactgggttttaacttatttttctttaataaaatacattgttttcctaaaaaaaaaaaaaaa

SEQ ID NO: 411 - DNA, 7556 bp, Homo sapiens
gcaggcgccttcgcggaccgagcctgacggagccggaggctgggagccgcggcggcctggggaagtgtttggattgtgagctatttcagaactgttctcaggactcattattttaacatttgggagaaacacagccagaagatgcacacttgactgaaggaggacagggaatctgaagactccggatgacatcagagctacttttcaacagccttctcaattttctttctcagaaagcagaggctcagagcttggagacagacgaacactgatatttgcatttaatggggaacaaaagatgaagaaggaaaaggaatatattcactaaggattctatctgcttactgctacagacctatgtgttaaggaattcttctcctcctccttgcgtagaagttgatcagcactgtggtcagactgcatttatcttgtcattgccagaagaaatcttggacagaatgtaacagtacgtctctctctgattgcgatggaaggtgataaactgatactcctttattaaagttacatcgcactcaccacagaaaaccattctttaaagtgaatagaaaccaagcccttgtgaacacttctattgaacatgactcatggagaagagcttggctctgatgtgcaccaggattctattgttttaacttacctagaaggattactaatgcatcaggcagcagggggatcaggtactgccgttgacaaaaagtctgctgggcataatgaagaggatcagaactttaacatttctggcagtgcatttcccacctgtcaaagtaatggtccagttctcaatacacatacatatcaggggtctggcatgctgcacctcaaaaaagccagactgttgcagtcttctgaggactggaatgcagcaaagcggaagaggctgtctgattctatcatgaatttaaacgtaaagaaggaagctttgctagctggcatggttgacagtgtgcctaaaggcaaacaggatagcacattactggcctctttgcttcagtcattcagctctaggctgcagactgttgctctgtcacaacaaatcaggcagagcctcaaggagcaaggatatgccctcagtcatgattctttaaaagtggagaaggatttaaggtgctatggtgttgcatcaagtcacttaaaaactttgttgaagaaaagtaaagttaaagatcaaaagcctgatacgaatcttcctgatgtgactaaaaacctcatcagagataggtttgcagagtctcctcatcatgttggacaaagtggaacaaaggtcatgagtgaaccgttgtcatgtgctgcaagattacaggctgttgcaagcatggtggaaaaaagggctagtcctgccacctcacctaaacctagtgttgcttgtagccagttagcattacttctgtcaagcgaagcccatttgcagcagtattctcgagaacacgctttaaaaacgcaaaatgcaaatcaagcagcaagtgaaagacttgctgctatggccagattgcaagaaaatggccagaaggatgttggcagttaccagctcccaaaaggaatgtcaagccatcttaatggtcaggcaagaacatcatcaagcaaactgatggctagcaaaagtagtgctacagtgtttcaaaatccaatgggtatcattccttcttcccctaaaaatgcaggttataagaactcactggaaagaaacaatataaaacaagctgctaacaatagtttgcttttacatcttcttaaaagccagactatacctaagccaatgaatggacacagtcacagtgagagaggaagcatttttgaggaaagtagtacacctacaactattgatgaatattcagataacaatcctagttttacagatgacagcagtggtgatgaaagttcttattccaactgtgttcccatagacttgtcttgcaaacaccgaactgaaaaatcagaatctgaccaacctgtttccctggataacttcactcaatccttgctaaacacttgggatccaaaagtcccagatgtagatatcaaagaagatcaagatacctcaaagaattctaagctaaactcacaccagaaagtaacacttcttcaattgctacttggccataagaatgaagaaaatgtagaaaaaaacaccagccctcagggagtacacaatgatgtgagcaagttcaatacacaaaattatgcaaggacttctgtgatagaaagccccagtacaaatcggactactccagtgagcactccacctttacttacatcaagcaaagcagggtctcccatcaatctctctcaacactctctggtcatcaaatggaattccccaccatatgtctgcagtactcagtctgaaaagctaacaaatactgcatctaaccactcaatggaccttacaaaaagcaaagacccaccaggagagaaaccagcccaaaatgaaggtgcacagaactctgcaacgtttagtgccagtaagctgttacaaaatttagcacaatgtggaatgcagtcatccatgtcagtggaagagcagagacccagcaaacagctgttaactggaaacacagataaaccgataggtatgattgatagattaaatagccctttgctctcaaataaaacaaatgcagttgaagaaaataaagcatttagtagtcaaccaacaggtcctgaaccagggctttctggttctgaaatagaaaatctgcttgaaagacgtactgtcctccagttgctcctggggaaccccaacaaagggaagagtgaaaaaaaagagaaaactcccttaagagatgaaagtactcaggaacactcagagagagctttaagtgaacaaatactgatggtgaaaataaaatctgagccttgtgatgacttacaaattcctaacacaaatgtgcacttgagccatgatgctaagagtgccccattcttgggtatggctcctgctgtgcagagaagcgcacctgccttaccagtgtccgaagactttaaatcggagcctgtttcacctcaggatttttctttctccaagaatggtctgctaagtcgattgctaagacaaaatcaagatagttacctggcagatgattcagacaggagtcacagaaataatgaaatggcacttctagaatcaaagaatctttgcatggtccctaagaaaaggaagctttatactgagccattagaaaatccatttaaaaagatgaaaaacaacattgttgatgctgcaaacaatcacagtgccccagaagtactgtatgggtccttgcttaaccaggaagagctgaaatttagcagaaatgatcttgaatttaaatatcctgctggtcatggctcagccagcgaaagtgaacacaggagttgggccagagagagcaaaagctttaatgttctgaaacagctgcttctctcagaaaactgtgtgcgagatttgtccccgcacagaagtaactctgtggctgacagtaaaaagaaaggacacaaaaataatgtgaccaacagcaaacctgaatttagcatttcttctttaaatggactgatgtacagttccactcagcccagcagttgcatggataacaggacattttcatacccaggtgtagtaaaaactcctgtgagtcctactttccctgagcacttgggctgtgcagggtctagaccagaatctgggcttttgaatgggtgttccatgcccagtgagaaaggacccattaagtgggttatcactgatgcggagaagaatgagtatgaaaaagactctccaagattgaccaaaaccaacccaatactatattacatgcttcaaaaaggaggcaattctgttaccagtcgagaaacacaagacaaggacatttggagggaggcttcatctgctgaaagtgtctcacaggtcacagccaaagaagagttacttcctactgcagaaacgaaagcttctttctttaatttaagaagcccttacaatagccatatgggaaataatgcttctcgcccacacagcgcaaatggagaagtttatggacttctgggaagcgtgctaacgataaagaaagaatcagaataaaatgtacctgccatccagttttggatctttttaaaactaatgagtatgaacttgagatctgtataaataagagcatgatttgaaaaaaagcatggtataattgaaacttttttcattttgaaaagtattggttactggtgatgttgaaatatgcatactaatttttgcttaacattagatgtcatgaggaaactactgaactagcaattggttgtttaacacttctgtatgcatcagataacaactgtgagtagcctatgaatgaaattcttttataaatattaggcataaattaaaatgtaaaactccattcatagtggattaatgcattttgctgcctttattagggtactttattttgcttttcagaagtcagcctacataacacatttttaaagtctaaactgttaaacaactctttaaaggataattatccaataaaaaaaaacctagtgctgattcacagcttattatccaattcaaaaataaattagaaaaatatatgcttacatttttcacttttgctaaaaagaaaaaaaaaaggtgtttatttttaactcttggaagaggttttgtggttcccaatgtgtctgtcccaccctgatccttttcaatatatatttctttaaaccttgtgctacttagtaaaaattgattacaattgagggaagtttgatagatcctttaaaaaaaaggcagatttccattttttgtattttaactactttactaaattaatactcctccttttacagaattagaaaagttaacatttatctttaggtggtttcctgaaaagttgaatatttaagaaattgtttttaacagaagcaaaatggcttttctttggacagttttcaccatctcttgtaaaagttaattctcaccattcctgtggtacctgcgagtgttatgaccaggattccttaaacctgaactcagaccacttgcattagaaccatctggagcacttgttttaaaatgcagattcataggcagcatctcagatctacagaacaagaatctctgctaagtggacctggaatcttccatctgcatcttaacatgctctctaggtgtttcttgtgtttgagaaccatgacttatgactttcctcagaacatgagactgtaaaacaaaaacaaaaaactatgtgatgcctctattttccccaatacagtcacacatcagctcaaaatttgcaatattgtagttcatatattaccgttatgtctttggaaatcgggttcagaacactttttatgacaaaaattgggtggaggggataactttcatatctggctcaacatctcaggaaaatctgtgattatttgtgtgttctaatgagtaacatctacttagttagccttagggatggaaaaacagggccacttaccaaactcaggtgattccaggatggtttggaaacttctcctgaatgcatccttaacctttattaaaaccattgtcctaagaacaatgccaacaaagcttacaacatttagtttaaacccaagaagggcactaaactcagattgactaaataaaaagtacaaagggcacatatacgtgacagaattgtacacaatcactccattggatcttttactttaaagtagtgatgaaaagtacatgttgatactgtcttagaagaaattaatatattagtgaagccacatggggtttcagttgcgaaacaggtctgtttttatgttcagtttgtacaatccacaattcattcaccagatattttgttcttaattgtgaaccaggttagcaaatgacctatcaaaaattattctataatcactactagttaggatattgatttaaaattgttctacttgaagtggtttctaagatttttatattaaaaataggtgtgatttcctaatatgatctaaaaccctaaatggttatttttcctcagaatgatttgtaaatagctactggaaatattatacagtaataggagtgggtattatgcaacatcatggagaagtgaaggcataggcttattctgacataaaattccactggccagttgaatatattctattccatgtccatactatgacaatcttattgtcaacactatataaataagcttttaaacaagtcatttttcttgatcgttgtggaaggtttggagccttagaggtatgtcagaaaaaatatgttggtattctcccttgggtagggggaaatgacctttttacaagagagtgaaatttaggtcagggaaaagaccaagggccagcattgctacttttgtgtgtgtgtgtgtgggttttgttttgtttttttggttggctggttgttttcgttgttgttaacaaaggaatgagaatatgtaatacttaaataaacatgaccacgaagaatgctgttctgatttactagagaatgttcccaatttgaatttagggtgattttaaagaacagtgagaaagggcatacatccacagattcactttgtttatgcatatgtagatacaaggatgcacatatacacattttcaaggactattttagatatctagacaatttcttctaataaagtcatttgtgaaagggtactacagcttattgacatcagtaaggtagcattcattacctgtttattctctgctgcatcttacagaagagtaaactggtgagagtatatattttatatatatatatatatatatatatataatatgtatatatatatatattgacttgttacatgaagatgttaaaatcggtttttaaaggtgatgtaaatagtgatttccttaatgaaaaatacatattttgtattgttctaatgcaacagaaaagccttttaatctctttggttcctgtatattccatgtataagtgtaaatataatcagacaggtttaaaagttgtgcatgtatgtatacagttgcaagtctggacaaatgtatagaataaaccttttatttaagttgtgattacctgctgcatgaaaagtgcatgggggaccctgtgcatctgtgcatttggcaaaatgtcttaacaaatcagatcagatgttcatcctaacatgacagtattccatttctggacatgacgtctgtggtttaagctttgtgaaagaatgtgctttgattcgaagggtcttaaagaatttttttaatcgtcaaccacttttaaacataaagaattcacacaactactttcatgaattttttaatcccattgcaaacattattccaagagtatcccagtattagcaatactggaatataggcacattaccattcatagtaagaattctggtgtttacacaaccaaatttgatgcgatctgctcagtaatataatttgccatttttattagaaatttaatttcttcatgtgatgtcatgaaactgtacatactgcagtgtgaatttttttgttttgttttttaatcttttagtgtttacttcctgcagtgaatttgaataaatgagaaaaaatgcattgtc

SEQ ID NO: 412 - DNA, 3514 bp, Homo sapiens
ccggaagtcgggaagactgcatccggctccaggaaaagcgagtgggatatcccaatctttggactgcatcctggttgcctctactgtggtcacctttgggaagaaatgtcttctgtaaaaagaagtctgaagcaagaaatagttactcagtttcactgttcagctgctgaaggagatattgccaagttaacaggaatactcagtcattctccatctcttctcaatgaaacttctgaaaatggctggactgctttaatgtatgcggcaaggaatgggcacccagagatagtccaatttctgcttgagaaagggtgtgacagatcaattgtcaataaatcaaggcagactgcactggacattgctgtattttggggttataagcatatagctaatttactagctactgctaaaggtgggaagaagccttggttcctaacgaatgaagtggaagaatgtgaaaattattttagcaaaacactactggaccggaaaagtgaaaagagaaataattctgactggctgctagctaaagaaagccatccagccacagtttttattcttttctcagatttaaatcccttggttactctaggtggcaataaagaaagtttccaacagccagaagttaggctttgtcagctgaactacacagatataaaggattatttggcccagcctgagaagatcaccttgatttttcttggagtagaacttgaaataaaagacaaactacttaattatgctggtgaagtcccgagagaggaggaagatggattggttgcctggtttgctctaggtatagatcctattgctgctgaagaattcaagcaaagacatgaaaattgttactttcttcatcctcctatgccagcccttctgcaattgaaagaaaaagaagctggggttgtagctcaagcaagatctgttcttgcctggcacagtcgatacaagttttgcccaacctgtggaaatgcaactaaaattgaagaaggtggctataagagattatgtttaaaagaagactgtcctagtctcaatggcgtccataatacctcatacccaagagttgatccagtagtaatcatgcaagttattcatccagatgggaccaaatgccttttaggcaggcagaaaagatttcccccaggcatgtttacttgccttgctggatttattgagcctggagagacaatagaagatgctgttaggagagaagtagaagaggaaagtggagtcaaagttggccatgttcagtatgttgcttgtcaaccatggccaatgccttcctccttaatgattggttgcttagctctagcagtgtctacagaaattaaagttgacaagaatgaaatagaggatgcccgctggttcactagagaacaggtcctggatgttctgaccaaagggaagcagcaggcattctttgtgccaccaagccgagctattgcacatcaattaatcaaacactggattagaataaatcctaatctctaaatctaagaactaagctttgagtattatttaataatttctaataacactcattcctcaagtgatattagagattattcagtactcttgagagtgtcacaacacaaaatacgatgttgggttttcgaaatattttcaaagtgttctgtcttaatcacaaattcatatttttacacatttttacaatattgcctcagattatgttaaatttgggtcagtcttctctgaactttttctctcttggtttcttttcttccttcacagttttatctcacaaaaccatttttctaataagagacatcatgttggaaagatgttctagaaatgtgcataaatttcagtgcctcttgtaagcattaaactgatgatgaagaaagttcctgatttgagaaatgaatcaaagtaattttaatgaatttttagcttgtattagcttgagttagctggcattgattttttagtccttttgttacctttaagttgtcaatatatggtttttgttcatctccccattgtagtcccacttgctctttcctgggggttccattgttctagcagtggaggtgttatagtgtcgccactcgtctaatttgaccagtgttaagaattttctaatttaataatttaatagtgatctcaataccacaccctcatggaaggagaaaagcatactattatatctgggacctctcttttagacctaaaattaattaacatatctacttatatgttacttatacctaaagctgttattaagacaaaccaagattctctgcttttgcactgaaattaaacttgaaaggaattctcctcaaaggtcggatattaaataagtcccaggcagatttacatatttaatttaaaacattggctttatttcattttgtgatgagtgatgtatctgtgttaacaaaaaattgtataatcattaccaatactatttattatgctcaaatatatcttggctttgaccttatttcaacacattctaagaagccttgacaaagtaagtatattttagagctgaatcagtaagattctagagaaagcaaaacatagtagttcacaattttgcaacatagaaagtcacattttgaaaggctattttgaaattgatttaatagctattatagtttatgaatatcaaaatttgtataatttgcatctttactaatgtatgctagagctacaagagaccttaaggataatatatgaaattagctttccttattttatagataaggaaaaagaaattgtgaaaggtgaatttacctaattagtgaaagttacataactaattacaacagtctgtactatataatgcagaggacgattctccctgtaaaaggaactagaagctattactaaaaatatatatagacaaaattaaaagaaggaatgataagaataaatttaatttaccaaatattgttaattaaaattttagatacttaacatttatttaacttaaataaaagataactgtcagataaaactttattttactaatgagcagtgattttcttaggaattgatgaaggcttattggtatcaagaatttaaaccaaattaaaactgacagaggacatttagatacataataaaattcgagctacataagtatatggaaaataatgtaccttgattattatgaaatagagcatcttgaaattcagttttactctaaatgtacttttaatacttgcagattctaagattacattgtaaaattccaggttttcataatgttaaaataggaaagtagaatataaagtatcaacaagtgtagttatacattttgttttggatatttaatccttacttgggaaaaaatcagcatctaggtaaattattattttaataacaactcttaaattgccaacctctgagaggtgaaaagctatgtaaatagaaggaatggccagttcaaaagaatagtagatgtgatagtgccgtgaatgtattctactggaaatgaatgtaataatacattaaatttttaaaatctaaaaaaaaaaaaaaa

SEQ ID NO: 413 - DNA, 10897 bp, Homo sapiens
agatatactgagtgagccctgagaagcagtctcagatcctgacggtgcagcagcccgcagcctcagccagggagtcccagccgctttcaatggaggagaagcccggccagccacagcctcagcaccatcacagccaccaccatccgcaccatcaccctcagcagcagcagcagcagccgcaccaccaccaccattattatttctacaaccacagccacaaccaccaccaccaccatcatcaccagcagcctcaccaatacctgcagcatggagccgagggcagccccaaggcccagccaaagccgctgaaacatgagcagaaacacaccctccagcagcaccaggaaacgccgaagaagaaaacaggctatggtgaactaaacggtaatgctggagaaagagaaatatctttaaagaacctgagttctgatgaagccaccaaccctatttccagggtcctcaatggcaaccagcaagttgtagacactagcctgaagcagactgtaaaggccaacacctttgggaaagcaggaattaaaaccaagaatttcattcagaaaaacagtatggacaaaaagaatgggaagtcttatgaaaataaatctggagagaatcagtctgtagataagtctgatactataccaattccaaatggtgtggtaacaaataattctggttatattactaatggttatatgggtaaaggagcagataatgatggtagtggatctgagagcggatatacaactcctaaaaaaaggaaagctaggcgcaatagtgccaagggttgtgaaaaccttaatatagtgcaggacaaaataatgcaacaagagaccagtgtcccaaccttaaaacagggacttgaaactttcaagcctgactatagtgaacaaaagggaaatcgagtagatggttcgaagcccatttggaagtatgaaactgggcctggaggaacaagtcgaggaaaacctgctgtgggtgatatgcttcggaaaagctcagatagtaaacctggtgtgagcagcaaaaagtttgatgatcggcccaaaggaaagcatgcttcagctgttgcctccaaagaggactcgtggaccctatttaaaccacccccagtttttccagtggacaatagcagtgctaaaatagttcctaaaataagttatgcaagcaaagttaaggaaaacctcaacaaaactatacagaactcttctgtgtcaccaacttcatcttcatcatcttcatcatctaccggggaaactcagacccaatcatcaagtcgcttatcccaggtccctatgtcagcgctgaaatctgttacttctgccaacttttctaatgggcctgttttagcagggactgatggaaatgtttatcctccagggggtcagccactgctaactactgctgctaatactctaacacccatctcttctgggacagattcagttctccaggacatgagtctaacttcagcagctgttgaacaaattaagactagcctttttatctatccttcaaatatgcaaactatgctgttgagcacagcacaagtggatctgccctctcagacagatcagcaaaacctgggggatatcttccagaatcagtggggtttatcatttataaatgagcccagtgctggccctgagactgttactgggaagtcatcagagcataaagtgatggaggtgacatttcaaggagaatatcctgctactttggtttcacagggtgctgaaataattccctcaggaactgagcatcctgtgtttcccaaggcttacgagctggagaaacggactagtcctcaagttctgggtagcattctaaaatctgggactactagtgagagtggagccttatccttggaacccagtcatataggtgacctgcagaaagcagacaccagtagtcaaggtgctttagtgtttctctcaaaggactacgagatagaaagtcaaaatcctctggcctctcctacgaacactttgttaggctctgccaaagaacagagataccagagaggcctagaaaggaatgatagctggggttcttttgacctgagggctgctattgtatatcacactaaagaaatggaatctatttggaatttgcagaagcaagatcccaaaaggataatcacttacaatgaagccatggatagtccagatcaatgaaggaccagactgcctattcgtaacctttctgcagcattagagccatcgttcatgggggacacaaggcttttatgctcctagatcttcaacgcagcagaggaaccataagtagaatcacaggataatatatacaaatatatatatatacatatatatatatatagttatttaaaaaaggcaactgaaagtaattagacttcttaaggaatcaaatttatttcaagagactacacatggttatttaatctccggtactgaataggttttttttcttctgttagtttttgtttttaagtgtgaatgcaagtgattaatgaatacagacttaacaagtgtggttctaaagttcctgctgtcatcaacttgggcaacaaatgacccactggaaaggcaaatccacttaaaagatctctgtatcttgttctgtgactgaagtgatacactaatcacggggaacccagaatgattcaacattttccccccactcctcccttgatctttttggttttactttaattaagccctgcgagaatgctggataaatgccttgaagttagcagggtgtatttttttagcgaatatgatttgcatgtcttgccaggagttaagcggcctctggggtgttggggaaatactttatttctttccatttattttttgtggggcggggataggggagggcattgaagttctacaattctggaatagttagttgatggtacatagttaacttggcttcggttacatattggactttaacaactgaagaatctatgcgtgtcatttaaagaaaagttgcagaacaagcaattggcttagatatacaatctggaaaaatattcctgtgcccatattttaatgtaattgtataactgggagcaaaaatatattctgcttttcaactgtaggtgctccagacttgctctccgtcactaacactaaatgtgctgttttccttgtttttcatcaaacatttaagacaaacttagacctttctgtaaattatcttttaatttctcagcaaaatctaaaaggggaagaaaaaagtccatgaaaactaaaacttttcatgtttttagccagtgagaagataataaaccctgactgtagaaggtgtgttttcatgcaaactatacttctgagcttgttagcttctaattatatcttaataaatatattttattactagagcaagatgggtttttaaggaaaataatgtgaaattctggaaattttctttggggcagagaagagcattagccctgtcttatcattacattgccatcctgttgcactgcagcttgtgtatagcatgctaaaataaatttttgtgtgtgtgtgcagaaattaagggtccaattgagattgggtgatgttagtaacataataacaagttgtctggcctgacacagcatcacatcacacacacagaaattagtatatccatgtatgtcaaatacaggttaaaatatcagggcatttatataaagagttgtagtcttctgataaaagtagactggatcccctggggtatttggggagaaagtaactactttggctctacccctagaaatgtccagttttgagtgactgtagtatggatgggttttcttgttttgttgattatttgaggcttttaaaacaagtagttcatgaaagaagctgttggactcaacatagagtagagtaactatctttttagtctggatttctgccctgcttagattttaaaagtataagcatggattgccaattccacttgatgtaaacaaaacttttttttatacataatatatatatatatatataaaataacttattgtatcagtccaggttcagaaacttgtggtaggccagttccagatagtttcatttcacctgtaaactgtatcactttgactgatattgtaattttcaaatgtataatatgtttacagatgtgccctgcatttagtctgccttgttcctattttgatttttgttgagtctcctgcctgcttgccaaaagctaggatgcttcaggcccatgtacaattgaaagcagaggcatccttgagctttaaagcattgaacaaactggaaaatgcaacataccacataactgaagtgaaaaaagtctgtgtttttgtgtttttttaaataaaaattttcaaaaagttaaaaaaaaagacatataaggttgattaaagggaaaaaaggctccagtttgttttacaggttttaaagttctgctgtgtgttcaattgccttgtgtaaccacttgtcgccttagggccagattcccctctctagtccccttttttaaatgtccattttgcttgcctggaattttaaagttcttccgtctcacaactcacaagaaactttctgggtttgtgacatacagaggttgaattgagtatatatttgaaaaggaaaaaacaaaaaacaaacccagaccccacctgaattgggctttttaacttagaagcaacacttgattaaacatctttagaaagctattgcttttctaatttccttccatatccctcaggcctcagtgttcagagaagccaaaaagaatgtatcacttctctgtctgtccaaaggtttttgagagtctcacttctaaatgaaacaatgcaacatttcactttgatttctccactgaaatttccttgattatatggttagaggtatgtagttaggaatgtctgttaactttctgagaaccctagtgccccatcatattaactgtcagtattttgggggcattaggttaatagacttaattgcctaggtacaagcaggactttgggacaaatctctttgtgctgtttggtaacacttaactctatttgttgcaatctttctccttaggtcctcacacaattccttacagagcacttattaaaaaaaaatcttaagagttgatctgttttctgattattttgtgtaagcttctaaacaaacttcagctgtgattaatttagcacatttaaataacgtgttattgtttggtataaagaattttccttcaactcagagtattagtactgtagcataaaccaaatacagtctagaggggatttttaacatccctccattataaagactgaaaaaggggtgtgtgtgtgtgtgtgtgtttatgtatgtatgtatgtgtgtgtgaggaaaagatggagatattaaaaattagtaaatgaatgtgtataagacattagtattcagagaatgaacttgtatttattttgtgccatttgttttcattacacagaaaaaagtcaggtggtttaaatccttaaaagggtagtattgaaaaatggcactaagaatgaaattatgacctatttttttaatagctatgaagatactaattatgggtgaagatttctttttaaatctgttttgattattgtaggcttctgtgtcacataccactcttgtaggtgtcctcaataatccccttttcccacaaaatacacagggtgtattatctttctctttattcacccccactttgctgaactgaagttaattacatagcctttcttctaacctccttagtaatgaaccttcacataaagtgtatttacagcgtctgtggtagccagcccttcctcctctactttctaggaggggatagccaataactaggaatttaatgacagatttttttttctttgaaataaatggccagagtttctccattttagaattttgttgtcctccttaatcatctgcttacctagtcattactcaatctgcagaaacttcataaaggaaaagtgctgcattgtttttacaaataacagtttgtagggaaaatatgacaaacctcaactatgggagttgtccacaatacaaaattttgaaaaaacattacatagtgataatatcatacttggttgttaggcttgttgcttccccacatcagaggcatctaatgatttatcttttgtaattgctgtgaacttttttaaataagccatttagtgtgaaattgtcatgtatcaaatggctattggaaatggactttactcaattttaattccactgtaaataaggacggagtcattcctacaaggctctcttcagagaaatagattaaaagtccaatttccaggtattattagtatagttatgccgctgggccacatcctcaacaacagctgatccctcttgtataaatatgttaactgtgcagaacagttatgttatgggacaaatataatggtcattatggtcagattggttgatgccacaccagtcaaggtagagtctgatagggcagtatcttaataaccctacccatgacttaactgttggatttgaaaggaaaacgtaggatttgctcttgtccccttacccgccacaaaattttgataatttgtttaaaagggagaggcagaggaaaagactagaagcataaatagctgctttaggtttgccagaggcacatagcttaacattagttcttaatatcgatgttatttttactaatgtaattaatcaacagagcaccaagattctttcatggtgaaaagggtgggcttctgttttggtatcttaaaatgtttcttttaaaatatacatcacctgtgtgagaaccaggaccacctgggagagtgatgaatcattggctccactcaaaagcattgctttactgagttttaaatttcacactgttttgccgctcaagaaaggtcttaaagtagttaaaggatgccagcaatagtgcgaatagaattttcggttgtctgcataataaaaacacccattgcagcatgattggtatgttgctcttgcattattgggaatggtaaatcagttatgggctagaaactatggaatggccgtcctcatatgtgatgggattgctgattcagacttccctattttccatacaattttgttatgtgcagagttctaaagccattttataatactgcagtatcccccccccccccacctttttttttttgagacggactgtctgttgcccaggctggagtacagtggcgcaatcttggctcactgcaacctccacctccctggttcaagcaattcccctgcctcagcctcccatgtagctgggattacgggcgcacaccaccacacctggctaatttgtattcttagtagagacggggtttcaccatgttgaccagactggtctcgaactcctgacctcaggcaatctgcccgcctcagcctcccaaagtgctggaattacaggtgtgagccaccgtgcccggccaagtatctcttttctacagccttattaaactaactacaaacatttattttccaatttagttttactttcagtgcatatcaaagttgttgtactcttcagaccaacaaattaacttgagggcaaattacatagctttccatgtacccttttttcctcaggtgctaatcaaaggctctgaaaatggatactgctttagtgatgtctgctttattcttaaaatgcttatttcttttgctagatgtaaagatttggtgttaacaaaagtggttttaatatgtaaatatgaatgaatgcctttagtttaccctgtttgtctattattaatctgttttcatttatccttcatagaggaggatcctttcatgatcttgaatacatttcattagatattgttgcattttaagaatgaaaatacaactgttttctgtcttagattaatcctgctgctatgagaaactgaaaatcaagaatgtgatgcactttttacattactatataccatacatataccataggttgctttgatacctttcctgtagcacagccactaacaagagtgaatgaattataaaattctttttgggagggaatcaatacaagtaactaattcttagctgatattgtcctatgaaggacaataacttaggaatataagaattctgttaatagtacactttttggccttaaatgtcttctactactgaaaatagtttaaatcttagctttgtttctattattccctctctctgcctcagaaagaggaattgggaagaatggcttaaaggacgtggtgtcattgatttgttgctgatcttttagaaaacatttgtctatgtaagctggggacttattttttgtttgtatatagaggggaaatagtgctgccctgaaccaatcagatttagtttaaatcaaatcaatcaaaactccagctgtttctcttgtctttttacttagcaaaggaaaactttagtgaatgctacttgacaagaagaaaagtcatttctcaagcacatacccaaacttgaaggtgattgaacccaaaataatgggtgggaaacaccaaatgaggtggaggaatgagaaagatgtgtgggccaaagctatctggttatattttgatgttgccaatatcgcaaagccaaaattttaatttgcttatttaatatatttgttggccagagatctatttttatatcaatgtgccttgcatgtatattaaaaaaaaaaaattggaaacgccatgtagtaatgcctgagatagtcgatggttcttaccacctcactaatttttatgcagtatgaaatgctcattctattgcccaactggtgctctctgtttaaagttacagatcttgcgaaactggaactattttataagctggggaagtgatttactttttttgttgtatcttttttgttcttagtctgttagtggctgtcctgtagtgggaaatagtaaaaggattcttcactcccttctcccctcagcaccttcttcaagtaaacatttcttgtgtgctttgaaaaaagtttcagcttgctgtctcttttagtgttttaaagaagtgttatacaaagcattgtttgcaaaatatagggagataatggagtccactttaatttggaattctgtgtgagctatgatccaagttatcagctctttccaactttaaaaattttgttaaaagcaccttgcttagaaaattttaaatatttatgtctgcaacaattgtctcaaaataataaactgtgcaattcttgtcattaaaaaaaaaaaagatctgaattttccctaatgtgacttgttagtttctctctgtatttcctgccagtgtaaatgtgaaagctttgcttgcattacgttttagaaatgcattttgcacactcgaattttgccgaagctccgtgaaaaggttagatctaagtagatgaataaagctatgcacatgttttgaaagtttaatttgtgtgtcattaccaaaagtgaccgatttgtccttactactttgctgttgttagctttaccatctttggaaacttggctcaaagttacatagttctgggctagctcatcagtggaactaggagagaggaaaactggcacctattttaataaagttcaatttaaacgagagcttgacttgtatctattaaagagcttttcttgaaacagggcagttttatcagctttacaaatcattggatgctcttccttagtaatattttggtttatttgatcaaatagaaatggaaagtaattcaaactgaaagacccttttttgtcatatggaacttggtgacgattttttgtcttaaagctggtttaaaggtaggataggcttttacctttattgctttagcataaatttggtttactgaattgactggcttgagattagaattattcagttgtttgtaagatcaaagcactggttgttttaaagataacgtgtatcttttaaaaaattgcccaagctgattagaacaagtttaggagttgggtacatttggttcaagtgctgcaatctgtatgtactaaatagctttactttgtgtatgtgtacttataatgtgtagatgtactactacccaggttttgtcaaatcatcttttttaaagtttttttttttttaattggttcaggacctttgtaggagaggctaatatgtttaagtagaagatattactgatagcattttccccatgctcctacataaaaaataaatatttccattttatagctttttcaatatacagaagagggttacttcttcatcaagtatattgttgcctttgaggacacagcaaaacccttctatatgtatcttcattgatagtggcagttaaaaactaagttatccagttaagacttaaaaggtgacccatattaattgcatggccttaaaaggcagaaatgcaggagtgtagcaagcatcattttagatggctatggttcctcttccgcatctgtcagtagttcacttatgttcagtcttagaacctactggaggagtgaagtaatttctctgtctcgtgcagaggcactaaggagctgagttacctcttaatctgggggaatggataataagtggagtacagttatgttaaaggatgttccccccgctcaaaaaaaagtttcaatgtttgttttgcccagtcaaaaatataggtcttttctacatataagaacagtcaccagaaattttcccttttgctaaatgcttaggtatttgctatagctgtttctgatgtcatggattctgaggaagtgtcatttacgtgatgatcttcctttattgatgtcttcatcatgttcagtgttttaaaaatataaattacaaacactctacaaccatacccagatttacttattttatcagaaaaaaaacttgagaaatttgtagatcaaattgagagacaataagtgtacattgttgaataaaaaattttaaagtttctgaaaaaaaaaaaaaaaaaa

SEQ ID NO: 414 - DNA, 1968 bp, Homo sapiens
agcccggcagcgcaggctcctcccacgacgctgcgggtccggtttccggcgggagcgtgggccgccagactcgggagaggctccgtcttgtgcaagggtcctgtgggctggctgcactggcctctgcggtggtgcctgccagaatgccccacttggaaaacgtggtgctttgtcgcgagtctcaagtgtccatcttgcagtccttgtttggagagagacatcatttcagctttccatccatttttatttatggacatactgctagtggaaagacctatgtaacacaaacgttgttgaaaactttagagctcccacatgtgtttgtgaattgtgttgaatgctttacattgaggctgcttttggaacaaattttaaacaaattgaatcatcttagttcttcagaggatggatgttctactgaaataacctgtgaaacatttaatgactttgttcgcttgtttaaacaagtaaccacagctgaaaatcttaaagatcagactgtatatattgttctagataaagcagagtatctaagagatatggaagcaaatcttttgcctggatttcttagattacaagaattggctgacagaaatgtgactgttctctttctcagtgaaattgtttgggaaaagtttcgtccaaatactggatgctttgagccgtttgtcttatatttccctgattacagcataggcaaccttcaaaagatcctgtcccatgatcatcctccagagtattcagctgatttctatgctgcctacattaacattcttcttggagttttctacactgtttgtcgagatttgaaagagctcagacatctggcagtacttaattttcctaaatattgtgaacccgtggttaaaggagaagcaagtgaacgtgatactcgcaaactgtggagaaatattgaacctcatttgaagaaagctatgcagactgtttatctcagggaaatatcaagttcccagtgggaaaagctacagaaagatgacacagatccggggcaactgaaaggcctctcagcgcatactcatgtggaacttccatattactctaagttcattctaattgctgcataccttgcttcatacaatccagcaagaactgacaagaggttttttcttaagcatcatggaaaaatcaagaaaaccaactttctaaaaaaacacgaaaagacaagcaatcatctccttgggccaaaaccatttccactagacagattattagcaatattatatagtatcgtggacagcagagttgctccaacagcaaatattttttcccagattacctctctagtgacccttcagctgttaaccctggttggccatgacgatcagcttgatggaccaaaatacaaatgcacagtgtctctagacttcatcagagctattgcaaggacggtgaactttgacataataaaatacttgtatgatttcttgtgaaaacaagcttcaaagccatatggacactgtgacaatgactaagccaagctgtgttcatccagctacttagctggccaaggagaggagttctttggctctattggatttgtccaaacaggtgctggcccagcatggaatctgatgaaaatattctgattggtctgggtggatgtgagcagaagactatttaccagggaccctggagtatttggaagcaacgtgttaattataaacagcagggtttgagcacaatctgttctactcttaatgatgttatcttaacactgaaattgcctgaaacccatttacttaggactacattttgctctgtgaactatcccctgcgctttgaacgtgccagcagcccttgtttatatgcccattcttttcacttcctctccacaggagcctctgcagtcgcttgccaaagcagattttcctaaggccactgttttaaaagatcatagttgcaaaatataataaatacaagttctttttaaaatccaaaaaaaaaaaa

SEQ ID NO: 415 - DNA, 4069 bp, Homo sapiens
gcaggccgaatggtggatttaattggccggagtttagggcgcgcttggcccgcgtgggtcagctgatcgcgcactgagggtgcgatcccgggctccccattccttcctggggcgcctccccggcccagggccaactgggtcccggtgtcggcaggcctggggtcggcgacggctgctcttttcgttctgtcgcctgcccgatggacgagcctcccgggaagcccctcagctgtgaggagaaggaaaagttaaaggagaaattagcattcttgaaaagggaatacagcaagacactagcccgccttcagcgtgcccaaagagctgaaaagattaagcattctattaagaaaacagtagaagaacaagattgtttgtctcagcaggatctctcaccgcagctaaaacactcagaacctaaaaataaaatatgtgtttatgacaagttacacatcaaaacccatcttgatgaagaaactggagaaaagacatctatcacacttgatgttgggcctgagtcctttaaccctggagatggcccaggaggattacctatacaaagaacagatgacacccaagaacattttccccacagggtcagtgaccctagtggtgagcaaaagcagaagctgccaagcagaagaaagaagcagcagaagaggacatttatttcacaggagagagactgtgtctttggcactgattcactcagattgtctgggaaaagactaaaggaacaggaagaaatcagtagcaaaaatcctgctagatcaccagtaactgaaataagaactcaccttttaagtcttaaatctgaacttccagattctccagaaccagttacagaaattaatgaagacagtgtattaattccaccaactgcccaaccagaaaaaggtgttgatacattcctaagaagacctaatttcaccagggcgactacagttcctttacagactctatcagatagcggtagtagtcagcaccttgaacacattcctcctaaaggtagcagtgaacttactactcacgacctaaaaaacattagatttacttcacctgtaagtttggaggcacaaggcaaaaaaatgactgtctctacagataacctccttgtaaataaagctataagtaaaagtggccaactgcccacaagttctaatttagaggcaaatatttcatgttctctaaatgaactcacctacaataacttaccagcaaatgaaaaccaaaacttaaaagaacaaaatcaaacagagaaatctttaaaatctcccagtgacactcttgatggcaggaatgaaaatcttcaggaaagtgagattctaagtcaacctaagagtcttagcctggaagcaacctctcctctttctgcagaaaaacattcttgcacagtgcctgaaggccttctgtttcctgcagaatattatgttagaacaacacgaagcatgtccaattgccagaggaaagtagccgtggaggctgtcattcagagtcatttggatgtcaagaaaaaagggtttaaaaataaaaataaggatgcaagtaaaaatttaaacctttccaatgaggaaactgaccaaagtgaaattaggatgtctggcacatgcacaggacaaccaagttcaagaacctctcagaaacttctctcattaactaaagtcagctctcccgctgggcccactgaagataatgacttgtctaggaaggcagttgcccaagcacctggtagaagatacacaggaaaaagaaaatcagcctgcaccccagcatcagatcattgtgaaccacttttgccaacttctagcctgtcgattgttaacaggtccaaggaagaagtcacctcacacaaatatcagcacgaaaaattatttattcaagtgaaagggaagaaaagtcgtcatcaaaaagaggattccctttcttggagtaatagtgcttatttatccttggatgatgatgctttcacggctccatttcatagggatggaatgctgagtttaaagcaactactgtcttttctcagtatcacagactttcagttacctgatgaagactttggacctcttaagcttgaaaaagtgaagtcctgctcagaaaaaccagtggagccctttgagtcaaaaatgtttggagagagacatcttaaagagggaagctgtatttttccagaggaactgagtcctaaacgcatggatacagaaatggaggacttagaagaggaccttattgttctaccaggaaaatcacatcccaaaaggccaaactcgcaaagccagcatacaaagacgggcctttcttcatccatattactttatactcctttaaatacggttgcgcctgatgataatgacaggcctaccacagacatgtgttcacctgctttccccatcttaggtactactccagcctttggccctcaaggctcctatgaaaaagcatctacagaagttgctggacgaacttgctgcacaccccaacttgctcatttgaaagactcagtctgtcttgccagtgatactaaacaattcgacagttcaggcagcccagcaaaaccacataccaccctgcaagtgtcaggcaggcaaggacaacctacctgtgactgtgactctgtcccgccaggaacacctccacccattgagtcattcacttttaaagaaaatcagctctgtagaaacacatgccaggagctgcataaacattccgtcgaacagactgaaacagcagagcttcctgcttctgatagcataaacccaggcaacctacaattggtttcagagttaaagaatccttcaggttcctgttccgtagatgtgagtgccatgttttgggaaagagccggttgtaaagagccatgtatcataactgcttgcgaagatgtagtttctctttggaaagctctggatgcttggcagtgggaaaaactttatacctggcacttcgcagaggttccagtattacagatagttccagtgcctgatgtgtataatctcgtgtgtgtagctttgggaaatttggaaatcagagagatcagggcattgttttgttcctctgatgatgaaagtgaaaagcaagtactactgaagtctggaaatataaaagctgtgcttggcctgacaaagaggaggctagttagtagcagtgggaccctttctgatcaacaagtagaagtcatgacgtttgcagaagatggaggaggcaaagaaaaccaatttttgatgccccctgaggagactatactaacttttgctgaggtccaagggatgcaagaagctctgcttggtactactattatgaacaacattgttatttggaatttaaaaactggtcaactcctgaaaaagatgcacattgatgattcttaccaagcttcagtctgtcacaaagcctattctgaaatggggcttctctttattgtcctgagtcatccctgtgccaaagagagtgagtcgttgcgaagccctgtgtttcagctcattgtgattaaccctaagacgactctcagcgtgggtgtgatgctgtactgtcttcctccagggcaggctggcaggttcctggaaggtgacgtgaaagatcactgtgcagcagcaatcttgacttctggaacaattgccatttgggacttacttctcggtcagtgtactgccctcctcccacctgtctctgaccaacattggtcttttgtgaaatggtcgggtacagactctcatttgctggctggacaaaaagatggaaatatatttgtataccactattcataagttagggtaaagtgaaaacacaattttctggatatattgggcctcttagtattttttggagttttaaatataaaggagaatatctgaatgacacttaaaatgattgcttgtttatgtccagacagacttattttttattctaatgatggtagcaccactgatcttggatgtacatttatgtatactttgagaaaaagggttttaggttgatttttgtaatttcccacatttgtacatgtgcttttaaaggtgtacataaagcttcaaatggcaataaatatttatttttatacattcaaaaaaaaaaa

SEQ ID NO: 416 - DNA, 3812 bp, Homo sapiens
gggcctactctgccgccgccgccgcccgcccgctccagccgccgccgccgccgccaccgccctccaggctccgggacccggcccgcgccaccgcccccgtgcgcgccccgccgccgccgccttcgccttcgccttttgtttcctccgctccggcgcccccgccccggctcgcgctttgcaggggacgcagcgcgcgcccccagcgggcccgggaaaagccgcggcgcgcgcgcgcgcctgcgcggcggacccctccttctcctccccgcgtgcgcgtgcccttcttggctgcgcgccggcgccgcctggcgggcgggaggggaggtggcaggcgcgtttgcaggaggggcgcacctcttcgctcgcgcacccccccggaaggtagaccgggaaggggaggcgggcgggcggagaggagagagtggcgcgcagtccagcgagggcgggggttggctatgtggggggtggtgcaccccgcagtctagacagtctgatccgggctgggggcgtgtacactcggcgcacctgcgagactacagagcctcgggccggcacgtgtggggagtgtggacacgtctgctgcgccccgcttctcgctgctgaggggaagggagggggcgggcaggtgcagcggccgggctagtgggagggggcggcggccatggagcgggtgaacgacgcttcgtgcggcccgtctggctgctacacataccaggtgagcagacacagcacggagatgctgcacaacctgaaccagcagcgcaaaaacggcgggcgcttctgcgacgtgctcttgcgggtaggcgacgagagcttcccagcgcaccgcgccgtgctggccgcctgcagcgagtactttgagtcggtgttcagcgcccagttgggcgacggcggagctgcggacgggggtccggctgatgtagggggcgcgacggcagcaccaggcggcggggccgggggcagccgggagctggagatgcacactatcagctccaaggtatttggggacattctggacttcgcctacacttcccgcatcgtggtgcgcttggagagctttcccgaactcatgacggccgccaagttcctgctgatgaggtcggttatcgagatctgccaggaagtcatcaaacagtccaacgtacagatcctggtaccccctgcccgcgccgatataatgctctttcgcccccctgggacctcggacttgggcttccctttggacatgaccaacggggcagccttggcagccaacagcaatggcatcgccggcagcatgcagccagaggaggaggcagctcgggcggctggtgcagccattgcaggccaagcctctttgcctgtgttacctggggtggaccgcttgcccatggtggctggacccctatccccccaactgctgacttccccattccccagtgtggcatccagtgcccctcccctgactggcaagcgaggccggggccgcccaaggaaggccaacctgctggactcaatgtttgggtccccagggggcctgagggaggcaggcatccttccatgcggtctatgtggtaaggtgttcactgatgccaaccggctccggcagcacgaggcccagcacggtgtcaccagcctccagctgggctacatcgaccttcctcctccgaggctgggtgagaatgggctacccatctctgaagaccccgacggcccccgaaagaggagccggaccaggaagcaggtggcttgtgagatctgcggcaagatcttccgtgatgtgtatcatcttaaccggcacaagctgtcccactctggggagaagccctactcctgccctgtgtgtgggttgcggttcaagagaaaagaccgcatgtcctaccatgtgcggtcccatgatgggtccgtgggcaagccttacatctgccagagctgtgggaaaggcttctccaggcctgatcacttgaacggacatatcaagcaggtgcacacttctgagcggcctcacaagtgtcagacctgcaatgcttcttttgccacccgagaccgtctgcgctcccacctggcctgtcatgaagacaaggtgccctgccaggtgtgtgggaagtacttgcgggcagcatacatggcagaccacctgaagaagcacagcgaggggcccagcaacttctgcagtatctgtaaccgaggtttctcctctgcctcctacttaaaggtccatgttaaaacccaccacggtgttccccttccccaggtctccaggcaccaggagcccatcctgaatgggggagcagcgttccactgcgccaggacctatggcaacaaagaaggccagaaatgctcacatcaggatccgattgagagctctgactcctatggtgacctctcagatgccagcgacctgaagacgccagagaagcagagtgccaatggctctttctcctgcgacatggcagtccccaaaaacaaaatggagtctgatggggagaagaagtacccatgccctgaatgtgggagcttcttccgctctaagtcctacttgaacaaacacatccagaaggtgcatgtccgggctctcgggggccccctgggggacctgggccctgcccttggctcacctttctctcctcagcagaacatgtctctcctcgagtcctttgggtttcagattgttcagtcggcatttgcgtcatctttagtagatcctgaggttgaccagcagcccatggggcctgaagggaaatgaggcagctgctgtgtccccacggaaacaaccatctggggactgctgggaaatgctgtgaatgcggagggaagtgatgtttgggttctgtagctgagagatttttattcatttttaactgccccccaaccccactccaactccttctccaccacccattctcccaatggtctttagaaatagattttcatctgatattctgcagaaatatcaatgagacttggtatgggacaggggcagaaaacactacataggcctccaaggcaaaaccagtcccagtttctttaatgggaagaagctggaattcctggtgctcaattcttagtgaccccaatcctatacccaaatctatgatattctgggacctcagtgattttggtcccctcccacttctctagttcgtcatcctcccttcccatatccttcaaaagaaccacactagggtctccacctacttatacaatgcggatgcccaactgtttttaaggaagccagaagcatcccatggaccatggggtgagtgtcctccaagagccccctgagctcagccctctgcctggagggctccagacctttctgagccctgcttggaggcgagcattttcactgctaggacaagctcagctgttgaggacacccccaccccaaatttcagttcttacgtgattttaaccattcaacatgctgttgggttttaattctctaattattattattattgttattattttttaggaccagttgtagtgaattgctactgaaagctatcccaggtgatacagagctctttgtaaaccgcagtcacacattagggttagtattaaactttgtttagatgtaccataattaacttggctagttgattgtttgaagtctatggaagaaatagttttatgcaaaattttaaaaaatgccagtctggtcagggaagtagggggtttcaatgctgttgggaaccaggaaggtgggacagccggcaggtagggacattgtgtacctcagttgtgtcacatgtgagcaagcccaggttgaccttgtgatgtgaattgatctgatcagactgtattaaaaatgttagtacattactcta

SEQ ID NO: 417 - DNA, 2418 bp, Homo sapiens
gcaaaccttaagctgaatgaacaacttttcttctcttgaatatatcttaacgccaaattttgagtgcttttttgttacccatcctcatatgtcccagctagaaagaatcctgggttggagctactgcatgttgattgttttgtttttccttttggctgttcattttggtggctactataaggaaatctaacacaaacagcaactgttttttgttgtttacttttgcatctttacttgtggagctgtggcaagtcctcatatcaaatacagaacatgatcttcctcctgctaatgttgagcctggaattgcagcttcaccagatagcagctttattcacagtgacagtccctaaggaactgtacataatagagcatggcagcaatgtgaccctggaatgcaactttgacactggaagtcatgtgaaccttggagcaataacagccagtttgcaaaaggtggaaaatgatacatccccacaccgtgaaagagccactttgctggaggagcagctgcccctagggaaggcctcgttccacatacctcaagtccaagtgagggacgaaggacagtaccaatgcataatcatctatggggtcgcctgggactacaagtacctgactctgaaagtcaaagcttcctacaggaaaataaacactcacatcctaaaggttccagaaacagatgaggtagagctcacctgccaggctacaggttatcctctggcagaagtatcctggccaaacgtcagcgttcctgccaacaccagccactccaggacccctgaaggcctctaccaggtcaccagtgttctgcgcctaaagccaccccctggcagaaacttcagctgtgtgttctggaatactcacgtgagggaacttactttggccagcattgaccttcaaagtcagatggaacccaggacccatccaacttggctgcttcacattttcatccccttctgcatcattgctttcattttcatagccacagtgatagccctaagaaaacaactctgtcaaaagctgtattcttcaaaagacacaacaaaaagacctgtcaccacaacaaagagggaagtgaacagtgctatctgaacctgtggtcttgggagccagggtgacctgatatgacatctaaagaagcttctggactctgaacaagaattcggtggcctgcagagcttgccatttgcacttttcaaatgcctttggatgacccagcactttaatctgaaacctgcaacaagactagccaacacctggccatgaaacttgccccttcactgatctggactcacctctggagcctatggctttaagcaagcactactgcactttacagaattaccccactggatcctggacccacagaattccttcaggatccttcttgctgccagactgaaagcaaaaggaattatttcccctcaagttttctaagtgatttccaaaagcagaggtgtgtggaaatttccagtaacagaaacagatgggttgccaatagagttattttttatctatagcttcctctgggtactagaagaggctattgagactatgagctcacagacagggcttcgcacaaactcaaatcataattgacatgttttatggattactggaatcttgatagcataatgaagttgttctaattaacagagagcatttaaatatacactaagtgcacaaattgtggagtaaagtcatcaagctctgtttttgaggtctaagtcacaaagcatttgttttaacctgtaatggcaccatgtttaatggtggttttttttttgaactacatctttcctttaaaaattattggtttctttttatttgtttttaccttagaaatcaattatatacagtcaaaaatatttgatatgctcatacgttgtatctgcagcaatttcagataagtagctaaaatggccaaagccccaaactaagcctccttttctggccctcaatatgactttaaatttgacttttcagtgcctcagtttgcacatctgtaatacagcaatgctaagtagtcaaggcctttgataattggcactatggaaatcctgcaagatcccactacatatgtgtggagcagaagggtaactcggctacagtaacagcttaattttgttaaatttgttctttatactggagccatgaagctcagagcattagctgacccttgaactattcaaatgggcacattagctagtataacagacttacataggtgggcctaaagcaagctccttaactgagcaaaatttggggcttatgagaatgaaagggtgtgaaattgactaacagacaaatcatacatctcagtttctcaattctcatgtaaatcagagaatgcctttaaagaataaaactcaattgttattcttcaacgttctttatatattctacttttgggta

SEQ ID NO: 418 - DNA, 4248 bp, Homo sapiens
gagacctcgcccctcctccgctcccgcctccccgccgccgcctcctctaatgagcatctctgccttgctttcaatgggccggtgctgctgtcgctgctgctgcccgcgcgggttgtggatgttgtcggctccgtgttgtgatgacaggagaatgtgtgtgtgtcccgggcccagacgaattggaatcccagtcagaagttccagcctgccactgttctctgatgccatgccagcaccaactcaactgttttttcctctcatccgtaactgtgaactgagcaggatctatggcactgcatgttactgccaccacaaacatctctgttgttcctcatcgtacattcctcagagtcgactgagatacacacctcatccagcatatgctaccttttgcaggccaaaggagaactggtggcagtacacccaaggaaggagatatgcttccacaccacagaaattttacctcacacctccacaagtcaatagcatccttaaagctaatgaatacagtttcaaagtgccagaatttgacggcaaaaatgtcagttctatccttggatttgacagcaatcagctgcctgcaaatgcacccattgaggaccggagaagtgcagcaacctgcttgcagaccagagggatgcttttgggggtttttgatggccatgcaggttgtgcttgttcccaggcagtcagtgaaagactcttttattatattgctgtctctttgttaccccatgagactttgctagagattgaaaatgcagtggagagcggccgggcactgctacccattctccagtggcacaagcaccccaatgattactttagtaaggaggcatccaaattgtactttaacagcttgaggacttactggcaagagcttatagacctcaacactggtgagtcgactgatattgatgttaaggaggctctaattaatgccttcaagaggcttgataatgacatctccttggaggcgcaagttggtgatcctaattcttttctcaactacctggtgcttcgagtggcattttctggagccactgcttgtgtggcccatgtggatggtgttgaccttcatgtggccaatactggcgatagcagagccatgctgggtgtgcaggaagaggacggctcatggtcagcagtcacgctgtctaatgaccacaatgctcaaaatgaaagagaactagaacggctgaaattggaacatccaaagagtgaggccaagagtgtcgtgaaacaggatcggctgcttggcttgctgatgccatttagggcatttggagatgtaaagttcaaatggagcattgaccttcaaaagagagtgatagaatctggcccagaccagttgaatgacaatgaatataccaagtttattcctcctaattatcacacacctccttatctcactgctgagccagaggtaacttaccaccgattaaggccacaggataagtttctggtgttggctactgatgggttgtgggagactatgcataggcaggatgtggttaggattgtgggtgagtacctaactggcatgcatcaccaacagccaatagctgttggtggctacaaggtgactctgggacagatgcatggccttttaacagaaaggagaaccaaaatgtcctcggtatttgaggatcagaacgcagcaacccatctcattcgccacgctgtgggcaacaacgagtttgggactgttgatcatgagcgcctctctaaaatgcttagtcttcctgaagagcttgctcgaatgtacagagatgacattacaatcattgtagttcagttcaattctcatgttgtaggggcgtatcaaaaccaagaatagtgagtggctctttcactggcaattctcaaatgatatacatttaaagggcagattttttaaaaagatactactataataaacatttccagttggtcattctaagcatttacccttttgatactctagctagtcaggtactccaaattgactttgcagcagggtggcagggtcaggagagtctggtcctgcctagctcagatttcatggcacctgcacttgaagcaagtcacttctttatcacaggtgtcttgaaacattagcttcttttaccaacctgagaaaattaggatgacctggcaaataagatcttgaataggccaaaagcaagtatcttgctgtgtgtagtctcttggttaaagtgaagaaacagtactgttcacacctttcttcactgagattccagtgtacatgagaacatatatttattgcatgattttctagatacacagtctatgcattattcatatacatttattttagcctaaagtggttttcaaatccagttcttcaagccataaatgaccaagatccaagcaatctgaatttgtttttgtgattatttgactggaatgcttcttaagtggaataactatactccgttatccacccgatttcctaatgtaattgaaagattttctattttgccacacacttggagacaataagggtttttagttttatctactcttctattgaagttaaagaaagaaaaaaagatttttttatttgtattaatgaaaagctttagtttaaaataaggagatccagaataaaaagaagagactgatctcttcaattattgtcatctgtagccaccagcacatcactcttatgtaatccccaaaggcttggcatgccgtaagtgtgtggtgggtagactgctgccggggaatcgtacttcttatttagtaatgataagacttttcattatttttggaattttaaagatgacataaataagtttaaatatcaatttggggagtaaggtttaatattgccatcgggtattgagacaggaggaagtttctgtttttctccatttagacataggtcaattaaaatatttgggtttaaaatgactaaatgctttaaacatattgtagcttaagatatatgtgttaagatatatacatgagaaactttaaaaggtaactactgtgcatgcctgatgcttaatagaatacttagtggcatcaaatgtttgcagcagtctccataattatattcagtcccttctaatactgtatcaatgtaaatgaaataaatatattcaaattggctttttgatatgcatcaagtggcattttgttcctgtgtttaatagtgatctgtatacagctgtgcacatattgtcatcacttattctagcatcactgttaaggctgtgattatgtttgatattcacctggattttaatacaagccaatatcagcttcccattgtgtaataacttgggtgtttaggagtcttttcacattttttggggatatgaactagatgttcaagaactccttctggactgtggatactgaatcagtgtactattggctgcagaatttgtttcaattgaaaatagactcaggaagattgctgctcagaatatcatataatgtttattttttgaggtgtttttgtttttatttgtgtgtttttttttttttaagtcagcttggaacttttttcctgggtagtatttgggagagggaaaggctgtactatatatttatttctaaatgttttgactgggcatttttcttttaatgaaatatgtggactgctctagcaaaccctattttcagctactatttgaatattcttgaacaccaccactgaagagtttcatatacaccaaataatgtctcatctctatagtacagggaatataaaattggtttcctgtggtcatgatcaagatagtagtattattacacaagaaacttggtctgcagtctggaagcttgtctgctctatagaaatgaaaatgcagcatgaagttgacattgtggaaatgaaagtaattgggtattagaaatctgaaagtactgtcatctaaaagcaattgtgattttattgtaattggttgtcactgttgtacggtgtctagaattaaagaatacatgtaaactttcatggtatttagcctttcttaaatttttttaaaatttaaactttctaacctatgtattcaacttctgtatttatatttaatcagtggttcatgttatataatacacccttaactagttaaatggaatgttggtatggtacagagtaccatattgctaagaaaactgtcttataaaagatgtatatgtgtgaagacatgaaagtttaatgtacagaatggttggagaaatgcctatggtgaattaaagcttcatatctgctttctgaaaaaaaaaaaaaaa

SEQ ID NO: 419 - DNA, 2509 bp, Homo sapiens
gcccctccccggctctgacatcaccggccagccgggtggagtgagcggcgctgggctcgggctccggctccgcgggcggaagaggcggcggcggcggcagaagcggcggcggcggcggcgggagccgaggaggaggttccggacgctgcttaggaaccggggactcaggagtgcccgcgccctgagcgctcagctccagaggcgtcatggctgagtacgggaccctcctgcaagacctgaccaacaacatcacccttgaagatctagaacagctcaagtcggcctgcaaggaagacatccccagcgaaaagagtgaggagatcactactggcagtgcctggtttagcttcctggagagccacaacaagctggacaaagacaacctctcctacattgagcacatctttgagatctcccgccgtcctgacctactcactatggtggttgactacagaacccgtgtgctgaagatctctgaggaggatgagctggacaccaagctaacccgtatccccagtgccaagaagtacaaagacattatccggcagccctctgaggaagagatcatcaaattggctcccccaccgaagaaggcctgagcaagggggaggaagaggaggaaggttggaccttcatcagaccactcccttcccccatcctccaggagagggggcaagggcaacccaccatctacccacttactaacctggtcctaacccccttactgtgcgcgtgtgtgtgcgtgtgcgcacgctctggctgtttgtctatatgtctagctcatctagttcctcttcttaaggggatgggggtcaggggctaggggagggggctgagtttccccactttaggaggaggtgggggctatttctatgcaaatagaaatcagcacattcctcctacttccctttcctccactccccccatatctttaaagtgtggaagcagaaaggacctgcattttcctacattgaggagctgacataggggtaaggtatgggagaggtaggtggatccagggaaaagcagtggggacggaaggcaaagagaccactcaacccccacctggaaggggcaaagaaaagccagagttccatgtttgtactcctgtgctggactgtttcctgagtaccagcaggtccctttttgtctctcatgggcctagcataggtatgagccagggatcctttcctggtccctaagatcaaaccccatggagcagccagcgttagatgcccccacccacctgtactctggagagactgtgctgggaacatgtaccactgagcctgagatggggatgagggcagagagaggggagccccctcttccactcagttgttcctactcagactgttgcactctaaacctagggaggttgaagaatgagacccttaggttttaacacgaatcctgacaccaccatctatagggtcccaacttggttattgtaggcaaccttccctctctccttggtgaagaacatcccaagccagaaagaagttaactacagtgttttcctttgcaccgatccccaccccaattcaatcccggaagggacttacttaggaaacccttctttactagatatcctggccccctgggcttgtgaacacctcctagccacatcactacagtacagtgagtgaccccagcctcctgcctaccccaagatgcccctccccaccctgaccgtgctaactgtgtgtacatatatattctacatatatgtatattaaaactgcactgccatgtctgcccttttttgtggtgtctagcattaacttattgtctaggccagagcgggggtgggaggggaatgccacagtgaagggagtggcagaatcaaattgctacatagtccaaacaaaaaagaaggctttttcaaaaaacattaaattcacatgcagtctcagagactatttagacaaagttcaagttaggagcttttaggatgtgggagtaaaactttaatgggaggggagggctggctgctggaagaaggaagaagccagactggttagacagtactcttaactcctagcccagcctagcgtgccctgcccctctggccactgctgcagacacctgccttaacacacacacctctaggactccacagttttgccttaaaggaccttcccaagtctccctttccctgtctggcttctcccttaagaagagagagatacttgtagaattgggtggggggaatgagcatgaactgtccttccatttgggatatgttacattagagtgagagagagaataaggagcctttcttatggaagaaatgggagaagagagacagggttcttttcagcagagtctagtagtttctctgtaaggcaaaataatctaaaaagactaacctgcccacccactccttatattgctgtgagattgcccctatcttgtgctcttctgtctgcagtgtgcacggccttgttctaacccggaataaaggtgattgattgtattgcaactaaaaaaaaaaaaaaaaaaaaaa

SEQ ID NO: 420 - DNA, 4390 bp, Homo sapiens
cgatcgatctcctccggctccgacgtcctcggcctgccgggtcccgggtcctttgcggcgctagggtgggcgaacccagagcgacgctccgggacgatgtggggcagcgatcgcctggcgggtgctgggggaggcggggcggcagtgactgtggccttcaccaacgctcgcgactgcttcctccacctgccgcggcgtctcgtggcccagctgcatctgctgcagaatcaagctatagaagtggtctggagtcaccagcctgcattcttgagctgggtggaaggcaggcattttagtgatcaaggtgaaaatgtggctgaaattaacagacaagttggtcaaaaacttggactctcaaatgggggacaggtatttctcaagccatgttcccatgtggtatcttgtcaacaagttgaggtggaacccctctcagcagatgattgggagatactggagctgcatgctgtttcccttgaacaacatcttctagatcaaattcgaatagtttttccaaaagccatttttcctgtttgggttgatcaacaaacgtacatatttatccaaattgttgcactaataccagctgcctcttatggaaggctggaaactgacaccaaactccttattcagccaaagacacgccgagccaaagagaatacattttcaaaagctgatgctgaatataaaaaacttcatagttatggaagagaccagaaaggaatgatgaaagaacttcaaaccaagcaacttcagtcaaatactgtgggaatcactgaatctaatgaaaacgagtcagagattccagttgactcatcatcagtagcaagtttatggactatgataggaagcattttttcctttcaatctgagaagaaacaagagacatcttggggtttaactgaaatcaatgcattcaaaaatatgcagtcaaaggttgttcctctagacaatattttcagagtatgcaaatctcaacctcctagtatatataacgcgtcagcaacctctgtttttcataaacactgtgccattcatgtatttccatgggaccaggaatattttgatgtagagcccagctttactgtgacatatggaaagctagttaagctactttctccaaagcaacagcaaagtaaaacaaaacaaaatgtgttatcacctgaaaaagagaagcagatgtcagagccactagatcaaaaaaaaattaggtcagatcataatgaagaagatgagaaggcctgtgtgctacaagtagtctggaatggacttgaagaattgaacaatgccatcaaatataccaaaaatgtagaagttctccatcttgggaaagtctggattccagatgacctgaggaagagactaaatatagaaatgcatgccgtagtcaggataactccagtggaagttacccctaaaattccaagatctctaaagttacaacctagagagaatttacctaaagacataagtgaagaagacataaaaactgtattttattcatggctacagcagtctactaccaccatgcttcctttggtaatatcagaggaagaatttattaagctggaaactaaagatggactgaaggaattttctctgagtatagttcattcttgggaaaaagaaaaagataaaaatatttttctgttgagtcccaatttgctgcagaagactacaatacaagtccttctagatcctatggtaaaagaagaaaacagtgaggaaattgactttattcttccttttttaaagctgagctctttgggaggagtgaattccttaggcgtatcctccttggagcacatcactcacagcctcctgggacgccctttgtctcggcagctgatgtctcttgttgcaggacttaggaatggagctcttttactcacaggaggaaagggaagtggaaaatcaactttagccaaagcaatctgtaaagaagcatttgacaaactggatgcccatgtggagagagttgactgtaaagctttacgaggaaaaaggcttgaaaacatacaaaaaaccctagaggtggctttctcagaggcagtgtggatgcagccatctgttgtcctgctggatgaccttgacctcattgctggactgcctgctgtcccggaacatgagcacagtcctgatgcggtgcagagccagcggcttgctcatgctttgaatgatatgataaaagagtttatctccatgggaagtttggttgcactgattgccacaagtcagtctcagcaatctctacatcctttacttgtttctgctcaaggagttcacatatttcagtgcgtccaacacattcagcctcctaatcaggaacaaagatgtgaaattctgtgtaatgtaataaaaaataaattggactgtgatataaacaagttcaccgatcttgacctgcagcatgtagctaaagaaactggcgggtttgtggctagagattttacagtacttgtggatcgagccatacattctcgactctctcgtcagagtatatccaccagagaaaaattagttttaacaacattggacttccaaaaggctctccgcggatttcttcctgcgtctttgcgaagtgtcaacctgcataaacctagagacctgggttgggacaagattggtgggttacatgaagttaggcagatactcatggatactatccagttacctgccaagtatccagaattatttgcaaacttgcccatacgacaaagaacaggaatactgttgtatggtccgcctggaacaggaaaaaccttactagctggggtaattgcacgagagagtagaatgaattttataagtgtcaaggggccagagttactcagcaaatacattggagcaagtgaacaagctgttcgggatatttttattagagcacaggctgcaaagccctgcattcttttctttgatgaatttgaatccattgctcctcggcggggtcatgataatacaggagttacagaccgagtagttaaccagttgctgactcagttggatggagtagaaggcttacagggtgtttatgtattggctgctactagtcgccctgacttgattgaccctgccctgcttaggcctggtcgactagataaatgtgtatactgtcctcctcctgatcaggtgtcacgtcttgaaattttaaatgtcctcagtgactctctacctctggcagatgatgttgaccttcagcatgtagcatcagtaactgactcctttactggagctgatctgaaagctttactttacaatgcccaattggaggccttacatggaatgctgctctcgagtggactccaggatggaagttccagctctgatagtgacctaagtctgtcttcaatggtctttcttaaccatagcagtggctctgacgattcagctggagatggagaatgtggcttagatcagtcccttgtttctttagagatgtccgagatccttccagatgaatcaaaattcaatatgtaccggctctactttggaagctcttatgaatcagaacttggaaatggaacctcttctgatttgagctcacaatgtctctctgcaccaagctccatgactcaggatttgcctggagttcctgggaaagaccagttgttttcacagcctccagtgttaaggacagcttcacaagagggttgccaagaacttacacaagaacaaagagatcaactgagggcagatatcagtattatcaaaggcagataccggagccaaagtggagaggacgaatccatgaaccaaccaggaccaatcaaaaccagactggctattagtcagtcacatttaatgactgcacttggtcacacaagaccatccattagtgaagatgactggaagaattttgctgagctatatgaaagctttcaaaatccaaagaggagaaaaaatcaaagtggaacaatgtttcgacctggacagaaagtaactttagcataaaatatacttctttttgatttggttctgttaagttttttgatggcttttccatatgttgtaacaggaaaaaaatggtgtctatgaatttcttcttaatttaacaaatttggttaatttataaaatcacagattggtaaatgctataattatgtaatgatcaggattgagattaatactgtagtataaattgggacattataacagattccatattttatttcctaaaatctaaattcagtctttaatgaaataatattagccaaatggtggaactaatttatttcttttgaggaaaagataataaagaatgtaattaaatttaaatttcttggaattcccagttgtatattcatcacctttgtagcatttgacaaattttatgcttagcagcttcttcactgttttgaaataaaatatcctattacctactgataaaaaaaaa

SEQ ID NO: 421 - DNA, 1836 bp, Homo sapiens
gctagggagtaggggtcgtctgataaggggaagctgtgacgcagacacgcacagtaatacacagatggaggctcaaaagacacgagtttcgcgtcctgaaattccgcttccagggccaagctttcttttctgatactgtttgtccctcgcgaggcaccgttgggtcgcgcagtaggcgtgactaggggcgggaagtggggcgggagcagggccgcggagcctgggctgcggctgtcatggacgcctgggtccgcttcagtgctcagagccaagcccgggagcggctgtgtagggccgcccagtatgcttgctctcttcttggccatgcgctgcagaggcatggagccagtcctgagttacagaaacagattcgacaactggagagccacctgagccttggaagaaagcttctacgcctgggtaactcagcagatgcccttgagtcagccaaaagagctgttcacctatcagatgttgtcctgagattctgcatcactgttagtcacctcaatcgagccttgtacttcgcctgtgacaatgtcctgtgggctggaaagtctggactggctccccgtgtggatcaggagaagtgggcccagcgttcattcaggtactatttgttttccctcatcatgaatttgagccgtgatgcttatgagattcgcctactgatggagcaagagtcttctgcttgtagccggcgactgaaaggttctggaggaggagtcccaggaggaagtgaaactgggggacttgggggaccagggactccaggaggaggtctgccccaactggctctgaaacttcggctgcaagtcctgctcctggctcgagtccttagaggtcatcccccacttctgctagacgtggtcagaaatgcctgtgatctcttcattcctctggacaaactaggcctctggcgctgtggccctgggattgtggggctttgtggcctcgtgtcctccatcctgtctattctcaccctaatctatccctggctacgactcaagccctgaccttccggtacaggataaggaggggacctgaattggtgagatggaatcttagatcgtcccccatgtgccagcctcattcgaattctactctttggttaaagttagaaattcagagatttaggggtggaggaagagctttggggaagatgaggtaaggaaagatgactcgtgaagttaataggatgtctctaatttctagatgtgcctgagcttctgttcttttcctctttctttgtgtctctcttgaatatatttactttgtgtctcttaactctgtttaaggttctgtgtctatgcatctctctctttcttttttcaaccttctcattctcctatccagggatttaatcagcagaattactttttgataggggaggtataaggtttggcctgtaaggttctaactgccttcttttttctcacagaggtggcttatggcagatttttcctccttcaaactccaaacataatttttaagactatgtgccagtggactcttcccttatatctctgcaccacaagttgttggatgtttcctcttcctcccttatgtctacctcaccaacctcgctcatcatttggcccttatccttccttgtacacctaccttcagatttctgcttacactttgatttcagagctttattccccagtctgttcttactcctttgtcgcttatccagaatgatgctatgtgtagcatcttgctgtaaatcctgtacaatgattctgtgtaaatagctgtggcctatgccaataatgaagagcaagcctttcaggtaagcaaattaaagttcagtttgctcatcgacaaaaaaaa

SEQ ID NO: 422 - DNA, 5693 bp, Homo sapiens
gcctcagcgggtgggcagcatggggcggggagggtgtcccctccgcgccgttaaaatgaaactctagtggctggagtccgggcagagcttgagggcagttggtgcggtcgggttggttcttacaccccggcgggagcgcccagacaagccgagctgactggacttctccggccggccccattcccgaggctgcggcagcttcggttccgagaccgaccggagaggagcccgagtcccggcctctgggggattcgctctctgcagaccagtgggaccccgaaacttgaacgcaatctccagcccccttttttgccttcctttgtcacttgcccgggtttctcccaacgtgttcttttttttcctcttcattctccctccttcgaaggacacaaaagtggcttccgcggaaagatttggaggcggtgggagcttttctccccggagagcgactgtgtagaaaggatttttgggaagccgctttttaacacctctgctctccgtcccccaagcctctgtgtaatcctctgaggagaaaagcccatagcttgaaagttcgggggcattttgttgtgttctgtaggagagagggggaggaccctgttcgggtagtttggccggactggtactggccgttggaaaacccgaagtacatttccgtgtggaacttttgcagatatatatttttagatttttaaataccagataaaaaatatatgccttctatatatctcctggcgacctgcccctgacagcgcgatgtacaatacggtgtggagtatggaccgcgatgacgcagactggagggaggtgatgatgccctattcgacagaactgatattttatattgaaatggatcctccagctcttccaccaaagccacctaagccaatgacttcagcagttccaaatggaatgaaggacagttctgtttctcttcaggatgcagaatggtactggggggatatttcaagggaggaggtaaatgacaaattgcgggatatgccagatgggaccttcttggtccgagatgcctcaacaaaaatgcagggagattatactttgactttgcggaagggaggcaataataagttaataaagatctatcaccgggatggtaaatatggcttttctgatcctctgacatttaattccgtggtggagctcattaaccactatcaccatgaatctcttgctcagtacaatcccaaacttgatgtgaagctgatgtacccagtgtccagataccaacaggatcagttggtaaaagaagataatattgatgcagtaggtaaaaaactgcaagaataccactctcagtatcaggagaagagtaaagagtatgataggctgtatgaagaatatactagaacatcccaggaaatacagatgaagaggactgcaatagaagcttttaatgaaacaattaaaatatttgaagagcagtgtcacacacaagaacaacatagcaaagaatatattgagcgatttcgcagagaggggaatgaaaaggagattgaacgaattatgatgaattatgataaattgaaatcacgtctgggtgagattcatgatagcaaaatgcgtctagagcaggatttgaagaatcaagctttggacaaccgagaaatagataaaaaaatgaatagcatcaaacctgacctgatccagctgcgaaagatccgagatcaacaccttgtatggctcaatcacaaaggagtgagacagaaacgcctgaatgtctggctgggaattaagaatgaggatgctgatgagaactattttatcaatgaggaagatgaaaacctgccccattatgatgagaaaacctggtttgttgaggatatcaatcgagtacaagcagaggacttgctttatgggaaacctgatggtgcattcttaattcgtgagagtagcaagaaaggatgctatgcttgctctgtggtggccgatggggaagtgaagcactgtgtgatctacagcactgctcggggctatggctttgcagagccctacaacctgtacagctctctgaaggagctagtgctccattaccagcagacatccttggttcagcacaacgactccctcaacgtcaggcttgcctaccctgttcatgcacagatgccctcgctttgcagataaagaggaagtgggaagagaggtggttctctggcatttttttctacagtttttattagactacgatgagggcattctttctacatagactgcttgttttgcacaagaagtgattttgtgaatgtgaagtggagaggccgagcagcagccggccgggatgggggcattagaggcctgaggttctctaggactcagccatgccgctgcactgacatactaagctggaagcagatgttttttttgaaagtctgtttcattggggtttttgttttgtttagccagacaccctcaacagaatattaggcttgatggttatagcgggtggggttgtatttggaagcctctgaagagaccatgtctttttaaaatctaactcttgagagtgcagcaggggcatggctctgctgggagttgtgttttgctttggcagtctctcttccccccacgaagaaggctgtttaggttttgtgatagaatgggatttgatgaaaaagacaaccaaaggaaaatggggaggcttgggatttcatttaaataatctaagccaagatgataaaaaaaaccttcaactgaaggtattttgtttcttaccaacataatttaggcttcagcatctcaccagcccctccctctgaagaagtattatgttcagaagccaacaaaacagtttgttgccagaccaatgtttgatgggaaaacgtggcactcatagttgaatgtatacttctgtaccaaaacttgaacataaaaagactagaatttgtgagttttagcaaacgctaaaattgatcactgtaactaaccccttctgtccttcctgcctgtttctctgagatgaggaatagcattctttttgtggggatggtgagctttgaatcataaaatgaagttggtgcttgtatggtgtttccttagcctaaagaatgatctgttgtttgaaacctttgtaacttgtttgtatgagtaaagaaaaggtgcaatgcagtgcttttagatggcttgatataccaaataacaatatagaacaacattattatatgtgcttccccaagtttaaaggccctgcagaaatagtaaacatggtttaatttcccttcatttccccctcctttgctggatggggttttgggagctataggttgctaaggaggggagtcagattgtggtcaggtgcctcagtaaatcacagacccaggggccctgtggtccagggtgagagtcacaccacattacacatgtgcttccatacagtggtttctgaagcttttgcagggagagaagatggcttagtgtttagactgttagtagaagccatctggaagcttttctctttgcctttttttgtgatcctgccattaaggctatgtgcagtctgccctcctgctccagtggccttgattttaggccaggaatcttctgctccatgtggcttaagccttccagctgagtgaagctaggcaaatggagtgggggcaggcatctattcctgcccccatcatgccccacacccatcagtcaacactcatttgacaaatagagtccagctgcctctgagccaatcctgggaccataataggctcagagtgagtcagctgtttgaacccaaagctgtgcagtcaggcaccctggctgagctagagaagccagtacctgcatcttggtttataaggcttacagctaggaaagctctagttctgggggtgaaagaaaaatattagtttacctgagcacttatttccatgacagggtctaaaatatggaccatgatgtagacacagatttttaattttggaaaaacctccagttactagtgacgaggatagaaagggaagtgcttctctttggctttttcttggttacactgcagtttcaggattgggtgagacagagacaaatgaacccccctctaaagtcatttaactaatagccagcacatcccttccccaaactgtcaattgaaatcttaactgaaagttttactgaataataccaagctaattgctgttgggcacacctggatggctttgcacctggtgttgaacctgctgaagcaggtggatgctcaagattacgtgcaaggaatccctcccatctggtactaaaatttcagtgtgttctgagtgtcttttaaaccaaaatggaaatacagatacagggctgtagtattcagtaatgtgtctgctccttgttgggcagacaccagcggtgtgcagggagagaccaagtaccatctttatctacacttgggctggcttgtggagaagggctgctttttttcagtcctacattccttcattttttttttcattcttgaattcattgttttgtgggatctaagacccaggggtcatttgagaggtttgacagtatcttttctgaccagttgccacatgacttgcttgaccctgagcctgtggaaatggcatagggaccagtctactacccactgggcctggtgtgtagagggggagagggtagcaaggtgcttctctacgcccatgacttgggagcaggtcttggcctccttcatgagagtctagtgccatgtcctgtcccatgatctggaccctgggactgtcttggcatcttaactgcagtttcaatgaggcagagggcaaagagagaccaagatcagaggggttcattatacccctggctagagaacccagctactgacatgcaagcagcttggggctggctggacacaggtactaggcccattgtttccaggtgaagctttcatcacagaacagtgttgtctccacctggccttagatggcacgccatgattcgggcctggatagactgcctgcgtccttaccactgatctggccaagaatgaggccctcccaacactttcactccctctccaagccttgatgggacctccacttatttaggcctcatgtgctttgaagaagctttgagagccaatgtgtcttccacgggtctcttttttgctacaagtaatcagccccatgtgttctcttaaactgagaattgcacctgggcaattcctgttttctaaggtggtctctgctgctatttaacaacccagagtaggcctctgtgaggcttcagtggcctcagaaaccagagggtccagatagggggcctgcttgggccctctgctgccaactgctcaaacctgctttagctccagccacttgtggcaaacaacctcgtttccttacaaattccagcatgtgactttggtgccgttacttgtgaaaaatctattctgttgtctttgatgtgtccaagaaaattcgtgtagtttacgtaaaaatatctgactcacaagaaagccaactgtatgtcttgtgatgggacagttcataatgtagttgctagaccactttacaaattgttcttgtcaccagatgtgttcagacattgctgtgcaattgttggggagggtagggggaaaggcgagaggagatacttattggtctttttgtttaataccttccccaagaggggacagtctggccaacttgctccagtaatgcaataaagacattgcaataaagtaaaaaaaaaaaaaaaaaaaa

SEQ ID NO: 423 - DNA, 3538 bp, Homo sapiens
ggcaagacaacgaggatttgcgtagggggcgagcctctgaggccacttggctcttacggccacgcagggcgccgcagatgcagccggagcccgcttttccctctcaggacgacccctaggccgccagcagttccctaccgacgaaggcgactgtacagcgtccaccgcgttcgtgcccacttacccgccgccccactccgggccgccggctcgcagcaggaccagcccggctgctacggccgcggatacacgccctcaggcccggcgctgcgcagcttgcggaagctttcccggacagactcgctgccagcggattggctgcgagcagcgccaatctcacgttgcccccgggcgaggcgggactcagtgccgcgctctctgcacccgctctgccgcgcgcgtgcgtgctgggtgcgggtgcgggtgcggggttgggcctgcgcatcgggtgagacgctggctgcttgcggctagtggatggtaattgcctgcctcgcgctagcaggaagctgctctgttaaaagcgaaaatgaaacaattgcctgcggcaacagttcgactcctttcaagttctcagatcatcacttcggtggtcagtgttgtaaaagagcttattgaaaactccttggatgctggtgccacaagcgtagatgttaaactggagaactatggatttgataaaattgaggtgcgagataacggggagggtatcaaggctgttgatgcacctgtaatggcaatgaagtactacacctcaaaaataaatagtcatgaagatcttgaaaatttgacaacttacggttttcgtggagaagccttggggtcaatttgttgtatagctgaggttttaattacaacaagaacggctgctgataattttagcacccagtatgttttagatggcagtggccacatactttctcagaaaccttcacatcttggtcaaggtacaactgtaactgctttaagattatttaagaatctacctgtaagaaagcagttttactcaactgcaaaaaaatgtaaagatgaaataaaaaagatccaagatctcctcatgagctttggtatccttaaacctgacttaaggattgtctttgtacataacaaggcagttatttggcagaaaagcagagtatcagatcacaagatggctctcatgtcagttctggggactgctgttatgaacaatatggaatcctttcagtaccactctgaagaatctcagatttatctcagtggatttcttccaaagtgtgatgcagaccactctttcactagtctttcaacaccagaaagaagtttcatcttcataaacagtcgaccagtacatcaaaaagatatcttaaagttaatccgacatcattacaatctgaaatgcctaaaggaatctactcgtttgtatcctgttttctttctgaaaatcgatgttcctacagctgatgttgatgtaaatttaacaccagataaaagccaagtattattacaaaataaggaatctgttttaattgctcttgaaaatctgatgacgacttgttatggaccattacctagtacaaattcttatgaaaataataaaacagatgtttccgcagctgacatcgttcttagtaaaacagcagaaacagatgtgctttttaataaagtggaatcatctggaaagaattattcaaatgttgatacttcagtcattccattccaaaatgatatgcataatgatgaatctggaaaaaacactgatgattgtttaaatcaccagataagtattggtgactttggttatggtcattgtagtagtgaaatttctaacattgataaaaacactaagaatgcatttcaggacatttcaatgagtaatgtatcatgggagaactctcagacggaatatagtaaaacttgttttataagttccgttaagcacacccagtcagaaaatggcaataaagaccatatagatgagagtggggaaaatgaggaagaagcaggtcttgaaaactcttcggaaatttctgcagatgagtggagcaggggaaatatacttaaaaattcagtgggagagaatattgaacctgtgaaaattttagtgcctgaaaaaagtttaccatgtaaagtaagtaataataattatccaatccctgaacaaatgaatcttaatgaagattcatgtaacaaaaaatcaaatgtaatagataataaatctggaaaagttacagcttatgatttacttagcaatcgagtaatcaagaaacccatgtcagcaagtgctctttttgttcaagatcatcgtcctcagtttctcatagaaaatcctaagactagtttagaggatgcaacactacaaattgaagaactgtggaagacattgagtgaagaggaaaaactgaaatatgaagagaaggctactaaagacttggaacgatacaatagtcaaatgaagagagccattgaacaggagtcacaaatgtcactaaaagatggcagaaaaaagataaaacccaccagcgcatggaatttggcccagaagcacaagttaaaaacctcattatctaatcaaccaaaacttgatgaactccttcagtcccaaattgaaaaaagaaggagtcaaaatattaaaatggtacagatccccttttctatgaaaaacttaaaaataaattttaagaaacaaaacaaagttgacttagaagagaaggatgaaccttgcttgatccacaatctcaggtttcctgatgcatggctaatgacatccaaaacagaggtaatgttattaaatccatatagagtagaagaagccctgctatttaaaagacttcttgagaatcataaacttcctgcagagccactggaaaagccaattatgttaacagagagtctttttaatggatctcattatttagacgttttatataaaatgacagcagatgaccaaagatacagtggatcaacttacctgtctgatcctcgtcttacagcgaatggtttcaagataaaattgataccaggagtttcaattactgaaaattacttggaaatagaaggaatggctaattgtctcccattctatggagtagcagatttaaaagaaattcttaatgctatattaaacagaaatgcaaaggaagtttatgaatgtagacctcgcaaagtgataagttatttagagggagaagcagtgcgtctatccagacaattacccatgtacttatcaaaagaggacatccaagacattatctacagaatgaagcaccagtttggaaatgaaattaaagagtgtgttcatggtcgcccattttttcatcatttaacctatcttccagaaactacatgattaaatatgtttaagaagattagttaccattgaaattggttctgtcataaaacagcatgagtctggttttaaattatctttgtattatgtgtcacatggttattttttaaatgaggattcactgacttgtttttatattgaaaaaagttccacgtattgtagaaaacgtaaataaactaatatagactattcaaaaaaaaaaaaaaaaaa

SEQ ID NO: 424 - DNA, 6590 bp, Homo sapiens
ggctggggagctaacctcgggagggcggggcgccgccgcgagccaccactggcacagggtgacgtcgctccgccgcgcagctggaagcctgcgaagtcaaatagcagccgcggggaggctcgttcccatcggcatctgtgactggctgcgatcgagggcccgggcggccggccagccgtctcgccgagtgcggactggccggatctgctgtcagtcagcgggaacagacttctccctctccatctggtcaactgcgggagaaaaattttcgagaatttccagcaggcaaggcagtggccgctttgactgcttgcttcggagatccgagacgacggagaaggcactcttatttaccgaccaagaaagctcctcccccgtcctccgttagctaattaaaacatttttcagggacgtagccatccagagacattccattattgttccattgacctttccctcatcactgagtcctttggagctgagttatgtcaacagctgccttaattactttggtcagaagtggtgggaaccaggtgagaaggagagtgctgctaagctcccgcctgctgcaggacgacaggcgggtgacacccacgtgccacagctccacttcagagcctaggtgttctcggtttgacccagatggtagtgggagtccagctacctgggacaattttgggatctgggataaccgcattgatgagccaattctgctgccacccagcattaagtatggcaagccaattcccaaaatcagcttggaaaatgtggggtgcgcctcacagattggcaaacggaaagagaatgaagatcggtttgacttcgctcagctgacagatgaggtcctgtactttgcagtgtatgatggacacggtggacctgcagcagctgatttctgtcatacccacatggagaaatgtattatggatttgcttcctaaggagaagaacttggaaactctgttgaccttggcttttctagaaatagataaagccttttcgagtcatgcccgcctgtctgctgatgcaactcttctgacctctgggactactgcaacagtagccctattgcgagatggtattgaactggttgtagccagtgttggggacagccgggctattttgtgtagaaaaggaaaacccatgaagctgaccattgaccatactccagaaagaaaagatgaaaaagaaaggatcaagaaatgtggtggttttgtagcttggaatagtttggggcagcctcacgtaaatggcaggcttgcaatgacaagaagtattggagatttggaccttaagaccagtggtgtcatagcagaacctgaaactaagaggattaagttacatcatgctgatgacagcttcctggtcctcaccacagatggaattaacttcatggtgaatagtcaagagatttgtgactttgtcaatcagtgccatgatcccaacgaagcagcccatgcggtgactgaacaggcaatacagtacggtactgaggataacagtactgcagtagtagtgccttttggtgcctggggaaaatataagaactctgaaatcaacttctcattcagcagaagctttgcctccagtggacgatgggcctgattaccagctgggacttagagtttctgtgcaacagtttttcactgagcatgtcaagaaactgataagatcaaaaaggtctcctaactcactagatcagcgcacaagtcagtgtaaaccacttagatagtagttttttcataaatgctcatcatatttatgttccgctgtacatgttcagtataaatatatgtgtagtgaagctactgtgagtctttaaatggaaagagcaaatgagaagtggtttggatacacttgatgagagatgagagtgtcacattaataatttttaagactcttaggcagctatgggtttcttttgatcatttttgttctttattcatttgaacacgtttttgaagttcttcaaaactagtcagtttgaattttgacagctattcaatatgtgatctccaagtttaaaaaaatttttttccagacttccctaatcctaaaatgcgagtttttatttttaataactgtaccaaggaataagtatgaaaacagttctctgttaccatattttgtattctggaccacttactggtgaaagcaaccatgcaaaagaaattaatttggccaggcacagtggctcatgcctgtaatcccagcactttgagaggccaaggtgggtagatcatctgaggtcaggaattcaagaccagcctggccaacatggtgaaaccctgtctctagtaaaaatccaaaaaaaaaaaaaaaaaaaaaaaaaaaattggctgggcgtggtggcagacacctgtaatcccagctactcgggaggctgaggaaagaggaatcacttgaacccaggagatgggggttgcagtgagctgagatcatgccattgcactccagcctgggcagcaagagcgaaaaactccatctcaaaaaaaaaaaaaaaaagaaagaaaagaaattaattcagatgatgtgacattactaaattgtatacatatttataaatgtgtatttcagctgtctcatcagccctcccctccatttattcctatttttctgtagttaagaatactgtaaaaatgtgactattccttaatatcagaaaagaatgcacaggctgagtcttccggtcaaaagttaaatactgatggaatcaagtattttgtatgaagttctcatttgttatctctaacgctattttgtgttttgcatatagtattatagtatgtgtatatcactttttgtatagagtaagcaattgaataatttgttaataaaaataataccacattgactgatactgctatagacatagcttgagttttatgtctcctttttgctcattttctaagacttaggagaaagaataaatctaaaatgaccattaaaacattctccatttcagcttgctgtgtaacttaggaagtataaaactatacttctctttatctgcatgtaagtttgctgttaaaatgtgaatttctaaatgtgtatttggaattatttccgtagtttatttctgcaaactatgtaaatttgttatatgtgtgagtatgtgtacatatgtatattttagagtaatataaaattaaagggaacaatcttgcatagctctttcaccagttttaaattattgatacgttatttttaaggactcttgacaaactaggggcaattttcttatagtggagacccagtgattatcagcagatgaggaaataggttaaaaattgctatatggcaatttgtatataaagtaataggatgtgagaaaaatactgaatcttaagaatgacatggaattctgtggcagaaacaaaagaaaaagttgatgtagtatataccttcaactgtgttttgagttgacttttttttttttctttaagctttgggtaaaaatgtatgaggagggagagggcccaatataaatatttacatcttcttacctttttggaaatggaagaagataaatcttgagtttttctgcctatattaatcaggaattgccctttgaaaaaagtgctaaataaatattttgattttttttttcaagggaagttaggtgaaagaaggaaaaacatcacaggaaagactgttaacattctgtttgttgtctgagaggtgaggaaccaaagggaggcaactaaagcgggaaaccatcttgctttttctaatcagttcttggaacagaaatgtggaagctacctttaggaacatggagaatttccaaaccaacaggcaaaggaaaactaacgcacaaaaatgacattctgaagatgcaggtttcagccaggcgcggtggctcaagcctgtaatcctagcactttgggaggccaaggcaggtggatcacctgaggtcaagagttagagaccagcctggccaacatggtgaaacctcatcttgaccaaaaaatgcaaaaattagccaggcgtggtggtgggtgcctgtaatcccagctactggggaggctgaggaaggagaattgcttgaacctgggaggcggaggttgcagtgagtcgagatcgcgccattgcactccagcctggacagcagagcaaaaactccatctcagataaataaataaacaaatatgcaggtttcatttttgttttgaatgctttacattactattcctatcttttactttaaaaactaagatgaggagtgatgttgtcaagttcaaaggcatgagggtgattgatggattgaggtagatagccaagtttgtctgtttttgttttttatagttacagagtctcactttgttgtccaggctgaagtgcagtggtgcaatcatagctcactgagattgccaggttcgacaaagaggaatttataggatggggatatagggtagacttgactctgctttatccgggaaagcttttaaaactctgagccagttaactttgagtaagcataaaacatactgtattggtgtttgtatttttcatgccacaatattaaaatggaattttaaatgtagattattataatctataaaagataagtatgcatgtattaggatactggaaaatatgcaaatcatagtaaaaaaaaagggactgctctagtttttcagttataactgaatttgccatgtgggtataggcatagtgtaaattacattaatgtagtaaaacatcaattgtggttcggtttgtctttcatttatgtgtagtatagaaatcacctttctaatatgtgttgccaaactatttgccaccatctatttggtgaaatattcattgtcattgtgattttccacaagtataagttcttaagtactttatagattcagaagtaaatgctgtcctgttctccatcagctgttcgtttgttacagattttgtatttctttttttttttttttgagatggagtctcactctgtcacacaggctggagtacagtggtgcggtctcggctccctgcaacctctgcctcccgggttcaaacgattcttctgcctcagcctcctgagtagctgggactacaggcgcgtgccaccacccctggctaatttttgtatttttttttcttttttttttttgagaaggagtctctctctgtcacccaggctggagtgcagtggcacgatctcggctcactgcaagctgcgcctcctgggttcacgccattctcctgcctcagcctcccgagtagctggaattacaggcgtccgccaccgtgcccggctaatttttttgtatttttagtagagatggggttttgccatattggccaggctggtctcgaactcctgacctcaagtgatccacccacctcggcctcccaaagtgctgggattacaggcatgagccaccgcacctggccagatctttgtatgtcttaagtgtttcaaagttataagcatttttctggggggatgtccattttggagggatccattttgatcctttgtactctataatgtgaactttcccctgttccaacacttaaaagagaattattagcacataatctaaaagatggaattttttttttttcttgagacagagtctcgctctgtcgccaggctggagtgcagtggcgcgatcttggctcactgcaacctctgcctcctgggtttaagcgattctcctgcctcagcctctggagtagctgggactactcgtgcatgccaccacgcccggctaatttttgtatttttagtagagacagggtttcaccatattggccaggatggtctcgatctcttgacctcgtgatccacctgcctcggcctcccaaattgctgggattacagcactgtgccctcctaggaaattattttttaagtgaaattttatttttattttttttaggattttggtagagaatgagtaggcctactcatcaatatcaaacaggacatttagtttctttccttagaacagacataaatttaatttcatggtaatatgataataagaaaatgcttctatttttctttagcacctccatggttctcatatacccatgtctgtaaaaagtgacatgagaattttgttgggttacattttattgtatttattagattcgcttatatagatgacttaggcagaaataaagtcatgtctttagaaggtgaacaagccaacttgtgatggcctgccttttgcttttggcagttgggatgagaacaattgactctcccattggttgttagatagttgaaatggtgcgttggtggtcatacttagtgttctaggctgtgaaatcatggagttcttccacttccaagaatgactcatttgctgttggattctagtacagaatttagcagcctgatgtgtccccaaactgatttaatttctactgaagtgcccttgtgtacatttgttttgtaatttaccaaagtactacctgagtgtataatgactcctgcagtgagttaatgtaattgctgctttgaccattgttttaaatctgtgtactagagtaactgtgagcagaatgaaatcacattatctcagtgttcaaaatatcattctaataaagtacatgcattaaacaattttaaaaatc

SEQ ID NO: 425 - DNA, 5574 bp, Homo sapiens
ttcctcccaccgccgacatctccgggaacccagcccaggccctgcctcccggacacaccgacgctcacgtagtcgcgcttgccacaaccctgcgggctctccgatgcggcgagcgagctggggagggggcttctccgcggcccaaaagcctgttcatctagccccatgatggctgtggacatcgagtacagatacaactgcatggctccttccttgcgccaagagaggtttgcctttaagatctcaccaaagcccagcaaaccactgaggccttgtattcagctgagcagcaagaatgaagccagtggaatggtggccccggctgtccaggagaagaaggtgaaaaagcgggtgtccttcgcagacaaccaggggctggccctgacaatggtcaaagtgttctcggaattcgatgacccgctagatatgccattcaacatcaccgagctcctagacaacattgtgagcttgacgacagcagagagcgagagctttgttctggatttttcccagccctctgcagattacttagactttagaaatcgacttcaggccgaccacgtctgccttgagaactgtgtgctcaaggacaaggccattgcaggcactgtgaaggttcagaacctcgcatttgagaagaccgtgaaaataaggatgacgttcgacacctggaagagctacacagactttccttgtcagtacgtgaaggacacttatgccggttcagacagggacacgttctccttcgacatcagcttgcccgagaagattcagtcttatgaaagaatggagtttgctgtgtactacgagtgcaatggacagacgtactgggacagcaacagaggcaagaactataggatcatccgggctgagttaaaatctacccagggaatgaccaagccccacagtggaccggatttgggaatatcctttgaccagttcggaagccctcggtgttcctatggtctgtttccagagtggccaagttacttaggatatgaaaagctagggccctactactagtgactgcaggtgacagggcgtggcggagctgccacagacaagcctagctctgctcactgtgcagtggagatggaaggccagggaggagcaacgtggaacttccatgaggccccgtttgggaaaataaaaggatcctcttcacttctttcttaaacagcaaatccagccaggttcagattacacaaccagtgtctcactcaaaggagcagtggtggctggcgcgctttcgcactgtggcagccacgagagtctgtgcacgtctgtgctggaaagggtatggatgggaatcaagcctatgccagtgctgatgaagctggaggagtctctcctctgctctccactcagatgtgggacatcagtcgccaaaagccactcagccccagccacctcgcgtgagaccctcactgttcattgtgttcatctttgggtgctctctgccagccaggcctttcctgcaagctgctgtgcttccccgtccacgtgtatctctgctgtgacacactgagctgacgcacatttccagtgcagctgcagaagagaaatgggattggctcttgttttctgcaagttcatgttttgcattttatgttcttccacaattgatctgatgttcaggaaaagataataaaggcaaattagttagtggttgagacaggcatttcctcctcccgcttcttgaccccacagatgtattccagcagagagcaacacaccagtcatcaaaacccactggctcctgtgcggtgtcacagattgcagggttctgacaaggcaggacagtcaagagtggggacactttcagcttctacttttgccttctagggggagctttctaagtccccacatttaccccgagtcaccggaaaaatctgatttttcccccgaaagctcaatgactttaacgtgcttggctggtttgtctcattctttatgaaagaattttggggccgggcgcggtggcttatgcctgtaatcccagcactttgggaggccgaggcaggtggatcacgaggtcaggagatcgagaccatcctggctaacacggtgaaaccctgtctctactaaaaatacaaaaaaattagccaggcgtggtggcgggcgcctgtagtcccagctacttgggaggctgaggcaggagaatggcgggaacctgggaggcggagcttacagtgaaccgagatcacaccactgcattcccgcctgggcagcagagcgagactccgtctcaaacagaaaaaaaaagagaattttgaatctcctttcccaaagagtcatcttttctgctgtgtttaggacatttgatttgcatatccaatatctcctcgaaaccttcagaaaatggttttatcgtgactgtgattcacactatctagaacactttaccagcacccagggacatggacttgggtgttcttatttatggtgtgtatgtaaagagataggggagaaaaacctcacccaagttcttatacgttattttaaacgtttgccaactctgaaatttcagagattcattgttcttaaccatattggactaaagtctgttggttagtgctgttgtaaaagagacctctggggccgagtgtggtggcttatgcctgtaatccctgcactttgggaagccaaggcgggcagctcacctgaggtcaggcgttcaagaccagcctggccaacatggtgaaacctcgtctgtactaaaaatacaaaatttagctgagtgtggtggcaggcgcctgtaatccagctactcgggaggctgaggcaggagaatcacttgaacccaggaggtggaggttgcagtgagccgagatcacgtcactgcatttcagcctgagcgacagagtgaaactgtctcaaaaaagagagacttccgggacagtcattatcagataggccccaaacctgtgatttttcttgggcaagattggtgtttacttaggggtgctttaaaaatatatttttacaagtatacttgtaggaagttggttttttattttctatttttgtttgtttttggagtttggttaaacgactcttttattttctgttttgccttatcttactaaagtgaagttttcctaaggcaagcaagaagaggagtggaagcacagttgcctggatttggaggcagagttgtcaggcttttcaagctaagagtcttgtgcttggattttccagattaatttgaaaagacctcccatttgtggctttgtacataaccaacaggcagatactgagtgccttggctcctagagttttgtggttgggttaggttgtttttgttgttgttttgttttggttttgttttcatttctgaagtttaagatgccttgactttttaaatgctcttaaggctattcgatgtaattcttactcctaaaactggctgttcttagcctgaaatctaatgctttgttttttgtacctctcccaggtgggtaacactctaggatgacatgatgttataattttaggggaaatcacatttttaccttatgctgttactgggcagaaccacgttttatgtaaacataccagacatcgggtaacagacagtactttaaatgttataaatttggtgatcagaactattaatagcataaatcgaactcaaatggaagcaaaactgatttcatgcaggtcctgaattttactttgccttaagaagtgccctccccacaatgcaggagaggcacagagtgcactgtcattgacatgttacccgactaaggatcactctgttcataagaaaaaggcctgaagtgactctgtttaataaagtcagtttaattttatctaataatgatcttaagacattcccatgtcaaaatttgaaatatggtaattcagtgataactatctcttctaaagcagccgtaaaccctccccactacccgtctttctcccagctcaccctggctttttttgctgggggtgctggatgcaagcccccagccagcacacctgggatgctcaccctgccgcacagttcagaaggcaagtcctcacctgctcgcaaagacccttcttctccaataaaagactctacttgcctgagtttcctcatcagggctgtcattcagtgatgtatgggggtctgaagaatactgccttctatctgtcttctgtttaccacttgctcctctgctaccctcctgccgcaaacagtcttcttccttttggcccagttctgtcccgtgaaattctcagaaggcctcgggagctgcgctgatgtattctctccttgtttgatagctcatcatcagtagataagcctacacacttcagagggtgacaggtttcttacttggagacttcactgcaccttgacttgtagatttgccttcagacagctcttggttatggttacaagtggcccccgagtcccagaatctttcccaggttgccccagaaagaccagccacctgtcacaggtgcagttgtccggcaatagggaagcaacttcatttttgttttatatttattccctcaagtgccctgaggagcatttgcaaactgggtacaataaataagctggattatacaaagatatttaataaataagctttcagtatctattggaagacatgaagcatttgagtgggtttctttatttaaaaaattattctactggagctggtgagaaataatgaagctgtacagttctccagaaattaaaacaatgtcagagtcaatgggagaatttaatttacctttaagatttcattttaatggtggcaaaattatacattcttagaagatgtaaatttggaactgttaggagattgctctgtggttttgatcttttcaaaccattttctttttgaaaaaaggcattagttgtagtcatggacattaaatgggccatatatgcttatcaatcaaaaaagtgttccttttttggaactgcccattttctggatcttccctctcaatggataggggatgaaaaccttggttgccttttatttgtttcctcttctaaaatttctcacctgaatgtagtcctgggagagtcccgatcacgtctctcctgacatgttcactgaaatcggagacaagaagttacatggatgatgggatcttatagggtcacacaaagacaatttggcagcttatcttaatttcctgcagtgagacaacacatgtggaactgggaaggacagctgttgttacgagcagtttttcctggtcatggttgtaaagctctgtaacccacattgtaaagccgtgaatgtttttagtcttgttgacgagtttttagagactgctggacctctgagggctttgagagtgcagctgtgatgatgtttcactattacttcagtgtgaatgtagaaccaaggactcatcttcattttatacctaaaagtgccttgtcaagaaatttttgcatgttttaaaagataaatatttttgtacacagagttcaaggggaaatgcactttaaaaatcccaagaatggatgttctttgtgtggtatgagaggttggtttgtatctcaaaagcaaaaatgtaataaaggaagacaaaacaaaacaaaaaaaaaaa

SEQ ID NO: 426 - DNA, 2576 bp, Homo sapiens
agataagcggcctctaggcgccgggccctcagtctctcccagcgaccgccgcgggggcaaggcctggagctgtggttcgaatttgtgcaggcagcgggtgctggcttttagggtccgccgcctctctgcctaatgagctgcaccagaatgatccaggttttagatccacgtcctttgacaagttcggtcatgcccgtggatgtggccatgaggctttgcttggcacattcaccacctgtgaagagtttcctgggcccgtacgatgaatttcaacgacgacattttgtgaataaattaaagcccctgaaatcatgtctcaatataaaacacaaagccaaatcacagaatgactggaagtgctcacacaaccaagccaagaagcgcgttgtgtttgctgactccaagggcctctctctcactgcgatccatgtcttctccgacctcccagaagaaccagcgtgggatctgcagtttgatctcttggaccttaatgatatctcctctgccttaaaacaccacgaggagaaaaacttgattttagatttccctcagccttcaaccgattacttaagtttccggagccactttcagaagaactttgtctgtctggagaactgctcgttgcaagagcgaacagtgacagggactgttaaagtcaaaaatgtgagttttgagaagaaagttcagatccgtatcactttcgattcttggaaaaactacactgacgtagactgtgtctatatgaaaaatgtgtatggtggcacagatagtgataccttctcatttgccattgacttaccccctgtcattccaactgagcagaaaattgagttctgcatttcttaccatgctaatgggcaagtcttttgggacaacaatgatggtcagaattatagaattgttcatgttcaatggaagcctgatggggtgcagacacagatggcaccccaggactgtgcattccaccagacgtctcctaagacagagttagagtcaacaatctttggcagtccgaggctggctagtgggctcttcccagagtggcagagctgggggagaatggagaacttggcctcttatcgatgaattaagcaacaatgtaactggtcttgacttgtcatattcccccatgcaatcctaggtctgtattgctcaattttaggaagcctttgctactccatcagtaggtttagatttgagcttttgagacctggctatggaaaagaaagacacttgagaatttagtgttggggtctgtacagatgatgctacccaatttggctttgaaggatcaagtaacaggttgaaaactatttttataaaggtaatactttttcagttcccttcttccttccctctcaatccactagctttcatgttgggcaaggaaaagttgaggaaggatggctgatggtgatggaaagctgtgttaatggtatgaggaatgtgtgaaaagtatacacaaagggctctgaagctcaagtcagaggagtgggaggtctgatcattgttggtggaaaaacgtaaggttattttgtgtttttaagttggttttacaattctttcctggggaaattatttctggaggggaaaaagatccattctacgtatccttgtggagaaaagctaaataacctttaagaatgtgggtggtattggagaaagaagatgaattatagctccggagaatcaagatcttaagtgaagcctttctgttcagatgtgatctataaaaaatcataatttggggaaagtttaagcaaatctggctttgtagtcctgatgttataagtgactttgtgatcaaactgtcaggcttgggttcttgttatagaatgcttggtatagaaaaaccatgccatcattaatggctaacaacacgtagggacttcatgtcatgtcaaagatagctctttgcaagtgccttgattaaaccagaaaactgtcatcgtttaacccaaatatctgaatggtcatctggtaactcatgggtttttggcctcataagatggtccactctgtacacaggcattcctcctgcaataatgttgtatctttgagaccgttgtcagtgtacacaactcacatccttcatattgaaggtgactcatttttctgcacacttttttgatgtgatgcttgacgtgaggcccgacactaggattctcaatgcaagaatccagtaccttgcacatagaagtagcaacccatcccttgcctattttcatcttgctgttttcttttttttaaaaaaatggatgtgacttgttttgaatgttttgtattatacttgtttttgtgtgtgcataaattcattctgtaggatcttaagaaaaagagtcccagaatgttgcttctattattgtgcacaaccattgagaggtgttacaagaatgcagttaattttaacatgtgtgatgtgccatggtggaaaagtactatcggaataactctgcagtgacagaatttgaagtttggctagcatccatacttttctactgtaaatatttcactctcctctagctatccttgatgagcttctcactttaagaataaatgtgtttgatataaggaaa

SEQ ID NO: 427 - DNA, 3027 bp, Homo sapiens
acacacacacacacacacacacacacacacacacacacacacacactcactctattttgtgctgtcgtaaaacccacgtgtccagccgggaagctgccagagcgtggaaccaaggagccaggacgcggcagcggccaagcgcagcagcccacggcggttgagtcgggcgcccaggtccgtccgcactctcgcgccctccgcgggcctcccaattttctcgcttgcaggtcgggaggtttccgggcggcacaatctctaggactctcctcccgcgctgctcaggggcatgtagcgcacgcagggcgcacactctcgcgcacccgcacgctcaccgagacacccgcacgcacccaccggcagcaccgagttttcagttcgaggcgccggacatgctgaagcccggagaccccggcggttcggccttcctcaaagtggacccagcctacctgcagcactggcagcaactcttccctcacggaggcgcaggcccgctcaagggcagcggcgccgcgggtctcctgagcgcgccgcagcctcttcagccgccgccgccgcccccgcccccggagcgcgctgagcctccgccggacagcctgcgcccgcggcccgcctctctctcctccgcctcgtccacgccggcttcctcttccacctccgcctcctccgcctcctcctgcgctgctgcggccgctgccgccgcgctggctggtctctcggccctgccggtgtcgcagctgccggtgttcgcgcctctagccgccgctgccgtcgccgccgagccgctgccccccaaggaactgtgcctcggcgccacctccggccccgggcccgtcaagtgcggtggtggtggcggcggcggcggggagggtcgcggcgccccgcgcttccgctgcagcgcagaggagctggactattacctgtatggccagcagcgcatggagatcatcccgctcaaccagcacaccagcgaccccaacaaccgttgcgacatgtgcgcggacaaccgcaacggcgagtgccctatgcatgggccactgcactcgctgcgccggcttgtgggcaccagcagcgctgcggccgccgcgcccccgccggagctgccggagtggctgcgggacctgcctcgcgaggtgtgcctctgcaccagtactgtgcccggcctggcctacggcatctgcgcggcgcagaggatccagcaaggcacctggattggacctttccaaggcgtgcttctgcccccagagaaggtgcaggcaggcgccgtgaggaacacgcagcatctctgggagatatatgaccaggatgggacactacagcactttattgatggtggggaacctagtaagtcgagctggatgaggtatatccgatgtgcaaggcactgcggagaacagaatctaacagtagttcagtacaggtcgaatatattctaccgagcctgtatagatatccctaggggcaccgagcttctggtgtggtacaatgacagctatacgtctttctttgggatccccttacaatgcattgcccaggatgaaaacttaaatgtcccttcaacggtaatggaagccatgtgcagacaagacgccctgcagcccttcaacaaaagcagcaaactcgcccctaccacccagcagcgctccgttgttttcccccagactccgtgcagcaggaacttctctcttctggataagtctgggcccattgaatcaggatttaatcaaatcaacgtgaaaaaccagcgagtcctggcaagcccaacttccacaagccagctccactcggagttcagtgactggcatctttggaaatgtgggcagtgctttaagactttcacccagcggatcctcttacagatgcacgtgtgcacgcagaaccccgacagaccctaccaatgcggccactgctcccagtccttttcccagccttcagaactgaggaaccacgtggtcactcactctagtgaccggcctttcaagtgcggctactgtggtcgtgcctttgccggggccaccaccctcaacaaccacatccgaacccacactggagaaaagcccttcaagtgcgagaggtgtgagaggagcttcacgcaggccacccagctgagccgacaccagcggatgcccaatgagtgcaagccaataactgagagcccagaatcaatcgaagtggattaacggattgactggttggaattaaactgcaaggaaagtcatgattaaatgtcacggacacttaagcaaaaccaaagatttcctctgagcaactttcaatcagtcccagaaaaccaaaagcagtaataaaataagtaagatgttaagagatattgatcctggcatggaagtcagaccaggaaagagattatttatttatgacttagggatgagacttatttcagtggacaactaacctgggatggttaacatttccagtcccaccatgtattttgctttgtttctaaaaagctttttaaaaactgttatttaataccaaagggaggaatcgtatgggttcttctgcccaccgttgtgactaagaatgcacagggacttggttctcgttgcacctttttttagtaacatgtttcatggggacccactgtacagcccttcattctgctgtgtcagtttggcctggcctgacactggctgccccagcggggaccacggaagcagagtgagagccttcgctgagtcaatgctaccttcagccccagacgcatcccatttccatgtcttccatgctcactgctcatgcactttttacacggtttcttccaaacagcccggtcttgatgcaggagagtctggaaaaggaagaaaatggtttcagtttcaaaattcaaaggaaaaagttgaggacttattttgtcctgtcaagattgcaagaacatgtaaaatgtacggagcttcataatacgttatattgttccgaagcagctcgttgagaaacatttgttttcaataacattttagcttaaaaaaaaaaaaagaaaatgaaaataaagttctttggtttaaggctgga

SEQ ID NO: 428 - DNA, 2850 bp, Homo sapiens
tcgcacttccgtgtgccgcggcgccggagcccgaggcggctgtagcccacatctcccgagcgacccccggcgcccgcccgccgcgcggaggcccgggccacacctcactggccgcttggcccatcccagtcagcgccgcgccgaaccccgtccgcgcgcgccggggagcggcgcccccgccgctgccgccgcgacccttggcgcctgcccctgcaacgggaggtctgcagggaactggccaggcaagggggcaggcccgtttctcctggtggttggtgcgttgtagcagcagcgggagccaggactaaggacaagcaggagctgggagccccagccccactgcaggccccaccatggcgccgttcctgcgcatcgccttcaactcctatgagctgggctccctgcaggccgaggacgaggcgaaccagcccttctgtgccgtgaagatgaaggaggcgctcagcacagagcgtgggaaaacactggtgcagaagaagccgaccatgtatcctgagtggaagtcgacgttcgatgcccacatctatgaggggcgcgtcatccagattgtgctaatgcgggcagcagaggagccagtgtctgaggtgaccgtgggtgtgtcggtgctggccgagcgctgcaagaagaacaatggcaaggctgagttctggctggacctgcagcctcaggccaaggtgttgatgtctgttcagtatttcctggaggacgtggattgcaaacagtctatgcgcagtgaggacgaggccaagttcccaacgatgaaccgccgcggagccatcaaacaggccaaaatccactacatcaagaaccatgagtttatcgccaccttctttgggcaacccaccttctgttctgtgtgcaaagactttgtctggggcctcaacaagcaaggctacaaatgcaggcaatgtaacgctgccatccacaagaaatgcatcgacaagatcatcggcagatgcactggcaccgcggccaacagccgggacactatattccagaaagaacgcttcaacatcgacatgccgcaccgcttcaaggttcacaactacatgagccccaccttctgtgaccactgcggcagcctgctctggggactggtgaagcagggattaaagtgtgaagactgcggcatgaatgtgcaccataaatgccgggagaaggtggccaacctctgcggcatcaaccagaagcttttggctgaggccttgaaccaagtcacccagagagcctcccggagatcagactcagcctcctcagagcctgttgggatatatcagggtttcgagaagaagaccggagttgctggggaggacatgcaagacaacagtgggacctacggcaagatctgggagggcagcagcaagtgcaacatcaacaacttcatcttccacaaggtcctgggcaaaggcagcttcgggaaggtgctgcttggagagctgaagggcagaggagagtactttgccatcaaggccctcaagaaggatgtggtcctgatcgacgacgacgtggagtgcaccatggttgagaagcgggtgctgacacttgccgcagagaatccctttctcacccacctcatctgcaccttccagaccaaggaccacctgttctttgtgatggagttcctcaacgggggggacctgatgtaccacatccaggacaaaggccgctttgaactctaccgtgccacgttttatgccgctgagataatgtgtggactgcagtttctacacagcaagggcatcatttacagggacctcaaactggacaatgtgctgctggaccgggatggccacatcaagattgccgactttgggatgtgcaaagagaacatattcggggagagccgggccagcaccttctgcggcacccctgactatatcgcccctgagatcctacagggcctgaagtacacattctctgtggactggtggtctttcggggtccttctgtacgagatgctcattggccagtcccccttccatggtgatgatgaggatgaactcttcgagtccatccgtgtggacacgccacattatccccgctggatcaccaaggagtccaaggacatcctggagaagctctttgaaagggaaccaaccaagaggctgggagtgaccggaaacatcaaaatccaccccttcttcaagaccataaactggactctgctggaaaagcggaggttggagccacctttcaggcccaaagtgaagtcacccagagactacagtaactttgaccaggagttcctgaacgagaaggcgcgcctctcctacagcgacaagaacctcatcgactccatggaccagtctgcattcgctggcttctcctttgtgaaccccaaattcgagcacctcctggaagattgaggttcctggacagatcaggctagccctgccctccacccacacctgcccgctccccacgataagcaccagtgggactgtggtgacttctgctgctggccccgcccctgcccccagagcgtccttggctgccgtctggccgggctctcatggtacttcctctgtgaactgtgtgtgaatctgcttttcctctgccttcggagggaaattgtaaatcctgtgtttcattacttgaatgtagttatctattgaaaatatatattatatacatagacatatatatatatataataggctgtatatattgctcagtagagaaaaaccatgggggactggtgatatgttgatctttttcaaaaaaatatatatatgacaaaaaaaaaaaaaaaggagcacaagctgtttgaaccaccaggtttatttgtgtgtctaaataaacaccaaatagtaccaaaaaaaaaaaaaaaaa

SEQ ID NO: 429 - DNA, 1391 bp, Homo sapiens
acacaccctgacccgcatcgccctgggtctctcgagcctgctgcctgctcccccgccccaccagccatggtggtttctggagcgcccccagccctgggtgggggctgtctcggcaccttcacctccctgctgctgctggcgtcgacagccatcctcaatgcggccaggatacctgttcccccagcctgtgggaagccccagcagctgaaccgggttgtgggcggcgaggacagcactgacagcgagtggccctggatcgtgagcatccagaagaatgggacccaccactgcgcaggttctctgctcaccagccgctgggtgatcactgctgcccactgtttcaaggacaacctgaacaaaccatacctgttctctgtgctgctgggggcctggcagctggggaaccctggctctcggtcccagaaggtgggtgttgcctgggtggagccccaccctgtgtattcctggaaggaaggtgcctgtgcagacattgccctggtgcgtctcgagcgctccatacagttctcagagcgggtcctgcccatctgcctacctgatgcctctatccacctccctccaaacacccactgctggatctcaggctgggggagcatccaagatggagttcccttgccccaccctcagaccctgcagaagctgaaggttcctatcatcgactcggaagtctgcagccatctgtactggcggggagcaggacagggacccatcactgaggacatgctgtgtgccggctacttggagggggagcgggatgcttgtctgggcgactccgggggccccctcatgtgccaggtggacggcgcctggctgctggccggcatcatcagctggggcgagggctgtgccgagcgcaacaggcccggggtctacatcagcctctctgcgcaccgctcctgggtggagaagatcgtgcaaggggtgcagctccgcgggcgcgctcaggggggtggggccctcagggcaccgagccagggctctggggccgccgcgcgctcctagggcgcagcgggacgcggggctcggatctgaaaggcggccagatccacatctggatctggatctgcggcggcctcgggcggtttcccccgccgtaaataggctcatctacctctacctctgggggcccggacggctgctgcggaaaggaaaccccctccccgacccgcccgacggcctcaggccccgcctccaaggcatcaggccccgcccaacggcctcatgtccccgcccccacgacttccggccccgccccgggccccagcgcttttgtgtatataaatgttaatgatttttataggtatttgtaaccctgcccacatatcttatttattcctccaatttcaataaattatttattctccagtgaaaaa

SEQ ID NO: 430 - DNA, 2128 bp, Homo sapiens
ggttccagtagttggtatggtccgagacagtatggctgctgcatttcggccctcgaatcgagttctcctgcaggcgctgcagattttggtgtatcctggggtgggaggctccggctctgtcagctgccgctgccctctcggagctaaaagatacctacttacagataatgtggtgaaattaaaagaatttcaacaaaagaaagtggctgttgcatgtaatctttctggcactaaagaaacgtattttagaaacttgaaaaagaaactgacccagaacaagctcatcttgaagggggagttgataaccttactacatttgtgtgagtctcgggaccatgtggaactggctaaaaatgtcatttacaggtaccatgcagagaacaaaaatttcactttgggggagtataaatttggaccgctttttgtgaggttgtgttacgagttggatctcgaggaatctgcagtggagctcatgaaagaccagcatttacgaggtttcttctcagactccacatcattcaatattttgatggatatgttatttatcaaaggcaaatataaaagtgctttgcaagtattgatagagatgaaaaaccaagatgtgaagttcaccaaagatacctatgttcttgcttttgcaatttgctacaaactgaatagccctgagtctttcaaaatctgtactacattaagagaagaagctctactcaaaggagaaattctctccaggagagcatcctgtttcgctgtggcattagctctgaatcagaatgagatggcaaaagctgtgtccattttttctcaaatcatgaatccagaaagcatagcctgcattaatttaaatattataatccatatccagtcaaatatgttggaaaacctgataaagactctaaaaaatgctgcagaaggaaatttatcaaaatttgtgaaaagacatgtgttctcggaggaagtgctggccaaagtgagggaaaaagtgaaggatgtgcctgcccttgtggccaaatttgatgagatctatgggacactgcacatcactggccaggtcaccactgattctttggatgctgtgctctgccacacccccagggacaggaaatctcacacgttgctattaaacaagaggatggtcagccgtcgcaccttccagccactcagccagtccctgttggctgagtaaccctggtttcagtccacctatggatctgaggggcctgcttctagtgagttattacctttcctaagaagccaggtatcgcacttcagcagacagtgtgctgacacttggtcttctcctgaaattcccaaattcactgaatggtaccatgccgatctctgagaagttatgttgcaccactgtgaaggtctagatgcaagcttggctccctcagaaaggcgcttcccttttgcatggctgaggatccttgaaggaacctggtcagtctccggttcagcttccgacaccagagtggaacccagtaagcaccatcaggaatgaatttcactacaagtgtggataactctgattttcaaaggagtagttacttgcaaattacatccttgctgaattcaggaggtatgaaaccctattttaccatgttagaaaacagcccaggattttctcattgctctgccatcatatatgtctatgacttgagcccttatttttccatctgcaaaacaataatgcctatgtgtctttgcatatagatttgaaatcttcattcaaggtttagtaggatcatattttctcaaaaataagagaaataaggttcataaggaaacttgctgggattgtggttgttttgttttctcagcagcacaaacaaaaccagaatttagcctttaggactgctgagtaagccaaatttaaatgactactgctttgttcatgggtaagccatgtgcttttcaaaataagtgccactaaaaaccacataatgctttggtttctatgtggataataaatatttagtcctatagtttatcttatttgttaatgatttttctctcttgaatgcctcatattaaaaaaaaatgtgccatgagagcagttcaaagctgcttcatacttatggtctcaaatatagtatgtgttgaattttaaaaaaaaaaaaaaaaaaaa

SEQ ID NO: 431 - DNA, 3240 bp, Homo sapiens
ggggaacgagctggggaagacggagcgggctctgtgccgggcgggcgggcggcgggggggccagcgaccgcagccggggggacgcgggaggatggagcaagtggagatcctgaggaaattcatccagagggtccaggccatgaagagtcctgaccacaatggggaggacaacttcgcccgggacttcatgcggttaagaagattgtctaccaaatatagaacagaaaagatatatcccacagccactggagaaaaagaagaaaatgttaaaaagaacagatacaaggacatactgccatttgatcacagccgagttaaattgacattaaagactccttcacaagattcagactatatcaatgcaaattttataaagggcgtctatgggccaaaagcatatgtagcaactcaaggacctttagcaaatacagtaatagatttttggaggatgatatgggagtataatgttgtgatcattgtaatggcctgccgagaatttgagatgggaaggaaaaaatgtgagcgctattggcctttgtatggagaagaccccataacgtttgcaccatttaaaatttcttgtgaggatgaacaagcaagaacagactacttcatcaggacactcttacttgaatttcaaaatgaatctcgtaggctgtatcagtttcattatgtgaactggccagaccatgatgttccttcatcatttgattctattctggacatgataagcttaatgaggaaatatcaagaacatgaagatgttcctatttgtattcattgcagtgcaggctgtggaagaacaggtgccatttgtgccatagattatacgtggaatttactaaaagctgggaaaataccagaggaatttaatgtatttaatttaatacaagaaatgagaacacaaaggcattctgcagtacaaacaaaggagcaatatgaacttgttcatagagctattgcccaactgtttgaaaaacagctacaactatatgaaattcatggagctcagaaaattgctgatggagtgaatgaaattaacactgaaaacatggtcagctccatagagcctgaaaaacaagattctcctcctccaaaaccaccaaggacccgcagttgccttgttgaaggggatgctaaagaagaaatactgcagccaccggaacctcatccagtgccacccatcttgacaccttctcccccttcagcttttccaacagtcactactgtgtggcaggacaatgatagataccatccaaagccagtgttgcatatggtttcatcagaacaacattcagcagacctcaacagaaactatagtaaatcaacagaacttccagggaaaaatgaatcaacaattgaacagatagataaaaaattggaacgaaatttaagttttgagattaagaaggtccctctccaagagggaccaaaaagttttgatgggaacacacttttgaataggggacatgcaattaaaattaaatctgcttcaccttgtatagctgataaaatctctaagccacaggaattaagttcagatctaaatgtcggtgatacttcccagaattcttgtgtggactgcagtgtaacacaatcaaacaaagtttcagttactccaccagaagaatcccagaattcagacacacctccaaggccagaccgcttgcctcttgatgagaaaggacatgtaacgtggtcatttcatggacctgaaaatgccatacccatacctgatttatctgaaggcaattcctcagatatcaactatcaaactaggaaaactgtgagtttaacaccaagtcctacaacacaagttgaaacacctgatcttgtggatcatgataacacttcaccactcttcagaacacccctcagttttactaatccacttcactctgatgactcagactcagatgaaagaaactctgatggtgctgtgacccagaataaaactaatatttcaacagcaagtgccacagtttctgctgccactagtactgaaagcatttctactaggaaagtattgccaatgtccattgctagacataatatagcaggaacaacacattcaggtgctgaaaaagatgttgatgttagtgaagattcacctcctcccctacctgaaagaactcctgaatcgtttgtgttagcaagtgaacataatacacctgtaagatcggaatggagtgaacttcaaagtcaggaacgatctgaacaaaaaaagtctgaaggcttgataacctctgaaaatgagaaatgtgatcatccagcgggaggtattcactatgaaatgtgcatagaatgtccacctactttcagtgacaagagagaacaaatatcagaaaatccaacagaagccacagatattggttttggtaatcgatgtggaaaacccaaaggaccaagagatccaccttcagaatggacatgattcagggagctagaagacactttaagttatactggaaaattcaggtgccactgaaagccagatttatagtattccatctttaatatgtgggactaacagcagtgtagattgttaccttaatattttttgctgggaccatctacctgccttatactacacttaggaaaaagtattacatatggtttattttgaaacttcaagtattattgccttaatgtctcttaaccctgttacacgctgcttgtagacatgttaatatagtaatacctttatgatatattgagtttaaggactactctttttctgttttatcatgtatgcattattttgtatatgtacagggcaagtaggtatataatttgataaagttgcaattgaaatattattaacagaagatgtaagaaatttctgcatggtctaaatctttgtgtactttatttgtaaattatttgccctggagttttagaaaatagtttctgaattttaaacttgctggattcatgcagccagctttgcaggttatcagagatcaaagattgtaataataattttgtaaattgtaagcaaaaagttatttttatattatatacagtctaattgttcatcctaattgttcctgttttcatctagtcagagattcagtaagtgccttggaacaatattgaattctcttagcttgtgtgtgtttctttaatatttgaactcaagtgggattagaagactatcaaaatacatgtatgtttcaggatatttgacctgtcattaaaaaaaacaaacagttttacagtgccaaaaaaaaaaaaaaa

SEQ ID NO: 432 - DNA, 1955 bp, Homo sapiens
attcatccccattcaggctttcctcagcatttattaaggactctctgctccagcctctcactctcactctcctccgctcaaactcagctcacttgagagtctcctcccgccagctgtggaaagaactttgcgtctctccagcaatgcatctccttgcgattctgttttgtgctctctggtctgcagtgttggccgagaactcggatgattatgatctcatgtatgtgaatttggacaacgaaatagacaatggactccatcccactgaggaccccacgccgtgcgcctgcggtcaggagcactcggaatgggacaagctcttcatcatgctggagaactcgcagatgagagagcgcatgctgctgcaagccacggacgacgtcctgcggggcgagctgcagaggctgcgggaggagctgggccggctcgcggaaagcctggcgaggccgtgcgcgccgggggctcccgcagaggccaggctgaccagtgctctggacgagctgctgcaggcgacccgcgacgcgggccgcaggctggcgcgtatggagggcgcggaggcgcagcgcccagaggaggcggggcgcgccctggccgcggtgctagaggagctgcggcagacgcgagccgacctgcacgcggtgcagggctgggctgcccggagctggctgccggcaggttgtgaaacagctattttattcccaatgcgttccaagaagatttttggaagcgtgcatccagtgagaccaatgaggcttgagtcttttagtgcctgcatttgggtcaaagccacagatgtattaaacaaaaccatcctgttttcctatggcacaaagaggaatccatatgaaatccagctgtatctcagctaccaatccatagtgtttgtggtgggtggagaggagaacaaactggttgctgaagccatggtttccctgggaaggtggacccacctgtgcggcacctggaattcagaggaagggctcacatccttgtgggtaaatggtgaactggcggctaccactgttgagatggccacaggtcacattgttcctgagggaggaatcctgcagattggccaagaaaagaatggctgctgtgtgggtggtggctttgatgaaacattagccttctctgggagactcacaggcttcaatatctgggatagtgttcttagcaatgaagagataagagagaccggaggagcagagtcttgtcacatccgggggaatattgttgggtggggagtcacagagatccagccacatggaggagctcagtatgtttcataaatgttgtgaaactccacttgaagccaaagaaagaaactcacacttaaaacacatgccagttgggaaggtctgaaaactcagtgcataataggaacacttgagactaatgaaagagagagttgagaccaatctttatttgtactggccaaatactgaataaacagttgaaggaaagacattggaaaaagcttttgaggataatgttactagactttatgccatggtgctttcagtttaatgctgtgtctctgtcagataaactctcaaataattaaaaaggactgtattgttgaacagagggacaattgttttacttttctttggttaattttgttttggccagagatgaattttacattggaagaataacaaaataagatttgttgtccattgttcattgttattggtatgtaccttattacaaaaaaaagatgaaaacatatttatactacaaggtgacttaacaactataaatgtagtttatgtgttataatcgaatgtcacgtttttgagaagatagtcatataagttatattgcaaaagggatttgtattaatttaagactatttttgtaaagctctactgtaaataaaatattttataaaactagctcacgtcatttaattataaatttaagagatgttttggaaaaaaaaaaaaaaaaaa

SEQ ID NO: 433 - DNA, 4877 bp, Homo sapiens
ggcggattggcgggcacgccccctcgcccgcggccccctccccgcctctctccaccgcctcctctggctccccggtcagagggccggagcgagaagatggcgaagacgtacgattatctcttcaagctcctgctgatcggcgactcgggggtaggcaagacctgcctcctgttccgcttctcagaggacgccttcaacaccaccttcatctccaccatcggaattgattttaaaattagaacgatagaactagatggaaagaaaattaagcttcagatatgggacacagcgggtcaggaaagattccgaacaatcacgacagcgtactacagaggagccatgggcattatgctggtctatgacatcacaaatgaaaaatcctttgacaatattaaaaattggatcagaaacattgaagagcatgcctcttccgatgtcgaaagaatgatcctgggtaacaaatgtgatatgaatgacaaaagacaagtgtcaaaagaaagaggggagaagctagcaattgactatgggattaaattcttggagacaagcgcaaaatccagtgcaaatgtagaagaggcattttttacacttgcacgagatataatgacaaaactcaacagaaaaatgaatgacagcaattcagcaggagcaggtggaccagtgaaaataacagaaaaccgatcaaagaagaccagtttctttcgttgctcgctactttgatgaactctttctgagagactgcagcacacctagagggccctttcctgcttctctgaaagcacaggtcacccagcctcagaatcacacctcccggctgctgctgagagcaccactgaacttagacctctcaacacagtatgccaagtggattccagcctcatggcctagcaaaagaacagactccctttttcaaacatggaagcaatgaagtggagacacatgcaggacctaactcgttttttccttgttttattacctgttgcagaagcggttatctttcttttttactttgcacatcagtgttagcctttccctatttcagcacaatcttagactcatatttgcacacttttgtgtcgtgaagttctagacaaatttgtacatgtggcaatgttaaaagagcatttacagcagaggttaatatactaaaattaaagggtatttggtctggttcatatggtcaaatattactgccttggtagcatttatttaagggctttttcttaaataagaatcattaaagtcattaaaaaaatttactgaaatgcccatcttgtcatcaaaggccacaatttctttatttcttcagattaagagctttgcctcatccccgacctgttttccagagtctgggtagctgaatgaatcactttaaaatgattacctctgcctaatctatagaaactgcatttggaaatcaccataatctcatttttccctggggtttgtatttgctattctttcccatgtttgacttaagtgtaatcactcttaagtaatatttgaacattattatctgtttctatttgtgaacttcttgagctgaaattttacgtgggctgagagatataccatttagggttttagtgcagcatctaactgtgattctgtcaataaggatatgtaatatattttttcttaggttcactccttagctggctggtttagttgtaataccaaattcctaccataatccctgtctacaaaagttaggtttagattttagtttgcggaaaccttccctatatagagacagattaacttgttgatataaatttaatagagctagctcttggtaatggtgaaaataatgagttttggttggttttatttggcagatgtttttagaaataaaagtacttagacctagtgcagcctctaggaaaagtcttgccttttcattagagaaaacaggaccaaggtttcagttttcaaacagctgttgttgattgtgtagaacccagttccatctgttttggttcattgttacagaacttagtccagtcatttgggctaaagccaaccaaaagcttagttgcctttctcaacaaacactggtactggtatacttttgtagatgaaaccatcacaaggtatttagtgttaacttgtgtgccaaattcagatcactatgtcgttgttgctctagccttcagtgtcataacacaggggggataaaacagaggggatgagggaaatgaattctgttaataattattcttcctggtatgcctgttttgcttcacaaaggctactatcatgctggatagataagaacaggagatggcagtggaaagggattgcttgttaccacagagaattctcttcaaattaagatatgtcattagaatgcttggaccagtcaatcttttgtacttatttgaaaatataggaacaatttagcagctgcaaatatgcccaagctatttttaatagatatactaaacttattgttgacaaatttcagcctccttaatttttttttttttggtaattacctataggcttaaaagtcattcgttgctgttctagtataattagtagttccgtgattgaaagtttattgtaattctactatcttcaaattagatacattttcaaaaggaaaagataattttttagaaacatcttaatattcactatttcctgaaaaaatccaagcagttaacgctttctggatggtaacaaagtaccttctaaaagataagtgctatgacaccatgtatgaatgtaattctcttagtaatttacctctgactatttggtgtcttaacgctttggtttatataatctcaggggttgtctgcaaaccaaaactgacatattctgtggttagcttttattacttttttttttaacagaatgctttgctttggttatatttcttctttcttcttttgtcttatatggattaataactagtctccatgaacttcacttgaaagagcctgtaaaagttagatgagtctaaaagtgctctttgaagtagcagcaaattgggagtatatgctctgttatatagaaataaattgtccttgctattttcttacatttagctttgctagattgtatatacattgagctaagaccttaggaaattcactttctgcatgataaaatgacccaataaatattccactttgcttaataatgtacatacagtgcattattttttctatttgtagatgaatttaatgacagataattgtctgttccccgctgaaactgaagaaatctagtttttttgtgaacatttttgtggtcttatggataaggtacatgaagatttttgcagcagtattagtggttcagtggctgcactttattaatcagtgtgttaatttttgacagtgattggactagaccttttcaaatagagtctgagggtatcagacagtgaaaatgtgctgtaactaagtagcatgtaaatcagttgattgtaaaacgtttcgctgggaacttattttagctatattttacttcagacagattatgatacaataatctacctgtgcatcagttagtaggtgctgcagggtttcttactatttacagaaacattttgtgcagtctttgttataaattttcagaagactatactctttactttgaaggtctattttttaattatacctcatttagctaactagtattctaatacctggtagaaaaacagtgagccagcctttaagcatctaacaaaatttagactctttgttttgttttgaactgaagacatcattgggaaaggtaggaaatattagtttaggatagagcatacatgtcatatccagtagcataaaaaaagtattatctccctgtctccattaataaatttagctgtgcaatataggtgcgtttttgcagaagtttctagtaagagattataactccattttacaggttctgaatgctcagagtctatattaaggcttataaagtttttcctgtgatcagtaagtgacacatttaagcagacattcttttcaagttcatgacttagattcctttacaaatttagttctcaatctttaaaaaccacatttcattatgttggttaattattataaattttaagcactcatttctgcaatcaggtttctcagaattttttttttttaaacagaagagacattcctttttccttgttacatccaaggggggcacaggggtgggtggaaaggaatgtctaaaaatgaaatcccttgatatagagggacctagacggacaggatatgctaaaataatttcaaattctagcacaattttagagtagaataagtcatttttttagactaataaaattaatggctgtcatgttcactctgaaaaaaatctaaatgactgaaatgtacagaaataaaaattagcaaacaattattctagggatattttcagattttacttcatttcttgaaatgcgtgtgccatatgcaattgcatttcttgtgccaagaaactaatagaacttatttcactttacctttttttaaaatgtgaatttagttattatagttcaattttatggccttacagatggcttttattttgtttgcagctgacactgcagttcctttcatgcaaaataccataaactgtttgatgaaaatcatgcccctaatggaaactctctagtttttccatataactatcctactgtacatgtttaaacatattttatttttgctccaatggcttaatgtgaaaagctcctgcagataagtggacctgtcatgtggttaatcttgtttaagccaattcattaactgtgtactgatactgatgctatgttttttttaaatggattttattccaggtgaactttttttttataataatgttcgtctaaaataaaaactacataatgaaaatgaaaa

SEQ ID NO: 434 - DNA, 5362 bp, Homo sapiens
atgcatctgtcactcccgctgaggctgggaagattgaaaggggccatggagaggctgcagtcacaatgaggcctccagattcatgtcatcaaagtgcttcatgatgactggattttcacaccatttatccaagggccctagtcaatggcagcagcaagaatgaaagtagacacattggaagctagagagtcactgggtgacttttggaggtagcaacaagctcatgaagaaggcattcagtggcttgcactccccacccatcctctcaactacatgcgaagttttcacatcttgtacatttccaaatttaatgaaaaaggtgttgaaaagtctcctctagagctttggaaggctgaatgcactaaacatgaagagcttgaaagcgaagttcaggaagagtgacgtaaattaaataaaactcatagagtgcaaagagacttcgacaaagacagaaaactagctgttggccagagtgaaagtcctggtcatccgacttccgagaaacctccttcaacctcatcgtctgctggctgtatgttatgcagcctacatatctcccgtggctttcagctaaggagaaaaagaccaatgagtggaacaagaatgatgaccggctactgcaggccgtggagaatggagatgcggagaaggtggcctcactgctcggcaagaagggggccagtgccaccaaacacgacagtgagggcaagaccgctttccatcttgctgctgcaaaaggacacgtggaatgcctcagggtcatgattacacatggtgtggatgtgacagcccaagatactaccggacacagcgccttacatctcgcagccaagaacagccaccatgaatgcatcaggaagctgcttcagtctaaatgcccagccgaaagtgtcgacagctctgggaaaacagctttacattatgcagcggctcagggctgccttcaagctgtgcagattctctgcgaacacaagagccccataaacctcaaagatttggatgggaatataccgctgcttcttgctgtacaaaatggtcacagtgagatctgtcactttctcctggatcatggagcagatgtcaattccaggaacaaaagtggaagaactgctctcatgctggcctgtgagattggcagctctaacgctgtggaagccttaattaaaaagggtgcagacctaaaccttgtagattctcttggatacaatgccttacattattccaaactctcagaaaatgcaggaattcaaagccttctattatcaaaaatctctcaggatgctgatttaaagaccccaacaaaaccaaagcagcatgaccaagtctctaaaataagctcagaaagaagtggaactccaaaaaaacgcaaagctccaccacctcctatcagtcctacccagttgagtgatgtctcttccccaagatcaataacttcgactccactatcgggaaaggaatcggtattttttgctgaaccacccttcaaggctgagatcagttctatacgagaaaacaaagacagactaagtgacagtactacaggtgctgatagcttattggatataagttctgaagctgaccaacaagatcttctctctctattgcaagcaaaagttgcttcccttaccttacacaataaggagttacaagataaattacaggccaaatcacccaaggaggcggaagcagacctaagctttgactcataccattccacccaaactgacttgggcccatccctgggaaaacctggtgaaacctctcccccagactccaaatcatctccatctgtcttaatacattctttaggtaaatccactactgacaatgatgtcagaattcagcaactgcaagagattttgcaagatctacagaagagattagagagctctgaagcagagagaaaacagctacaggtcgaactccaatcccgaagggcagaactggtatgcttaaacaacactgagatttcagagaacagctctgacctcagccagaaacttaaagaaactcagagcaaatacgaggaggctatgaaagaagtccttagtgtgcagaagcagatgaaactcggtcttgtctcacctgaaagcatggataattattcacatttccacgagctgagggtcacggaagaggaaataaatgtgctaaagcaggatctgcagaatgcattagaagaaagtgaaagaaataaagagaaagtgagagagttagaggaaaaactggtagagagggagaaaggtacagtgattaagccacctgtggaagagtacgaggaaatgaaaagttcatattgctctgttattgagaatatgaataaggagaaagcatttttgtttgagaaataccaagaagcccaagaagaaatcatgaaattaaaagacacactaaaaagtcagatgacacaggaagccagtgatgaagctgaggacatgaaagaagccatgaataggatgatagatgaactcaataaacaggtgagcgagctgtcacagctgtacaaagaagcccaggctgagctggaggattacaggaagaggaaatctctagaggatgtcacagctgaatatatccataaagcagagcatgagaaactgatgcaattgacaaacgtgtccagggctaaagcagaagatgcactgtctgaaatgaagtctcagtattcaaaagtgttgaatgagttgacccagctcaaacaactggtggatgcacaaaaagagaactctgtctctatcacagaacatttgcaagtgataaccacgctgcggactgcagcaaaagagatggaagaaaaaataagcaatcttaaggaacaccttgcaagcaaggaagtggaagtagcaaagctggagaaacaactcttagaagagaaagctgctatgactgatgcaatggtacctcggtcttcctatgaaaaactccagtcatccttagagagtgaagtgagtgtgttggcatcgaaattaaaggaatctgtgaaagagaaagagaaggtccattcagaggttgtccagattagaagtgaggtctcacaggtgaaaagagaaaaggaaaatattcagactctcttgaaatccaaagagcaagaagtaaatgaacttctgcaaaaattccagcaagctcaggaagaacttgcagaaatgaaaagatacgctgagagctcttcaaaactggaggaagataaagataaaaagataaatgagatgtcgaaggaagtcaccaaattgaaggaggccttgaacagcctctcccagctctcctactcaacaagctcatccaaaaggcagagtcagcagctggaggcgctgcagcagcaagtcaaacagctccagaaccagctggcggaatgcaagaaacaacaccaggaggtcatatcagtttacagaatgcatcttctgtatgctgtgcagggccagatggatgaagatgtccagaaagtactgaagcaaatccttaccatgtgtaaaaaccagtctcaaaagaagtaaagtggattccttggcaggacactgccccttgtcatctgtctttgtgttagatccagagttgtcggcagccgctgccattgttctcattcgtggtatgcactgtggcctagcgtagcttcttccctttccaaaggtttctgaggacttctcccaggagaagactgcccgcctcagaactgcttagagacttcaaaccagcagaggtgaaagtccctgtcatcccttcagattccagagctgggatcagccatgcccagaggtctggtcctgatgctggcaggggggccccctcctccatccctgactggctgagtggctttatcaccaccgagtgatgtgctgaggcctcctgcagtgaatgctccttccattcctgtactcgggcagtgccattcagcacaggagagctctttttgcctttggctttcaattccaaaacatgatttaatttctaactaaattagtatggcactagttatgaagtatctgcttaaaacccttcatcatgatatcctgtggatttaaaaactctaattccatgttttcttcccatctgccttatatatctcatcaccctgcttatcaatattcagtttgatgagcactattaactaaaatatgaaacttaaaaacaaaagcaagttgtccttaaaagttctttttttaagtaaattgttgacatactgcaaattttctatgcaaacttgcctcctgctgttatctgtgaagctcaggaaatccaaacatttgtgtttcaacaagggacagtaaactgtgtgtttacagccaaaagaaatgcctcatagttcttaacctcaacttttgtagaagtatttttttctctgtaatatttttattggctcataaagatgttttcatatctgaactcctaaataagtgaaattacagtagattatattaacaaaatactttttaggtagccatgcttgagactttttaaaaatataactttttccttaaagttttcagctatagcaaaaggtagttatgtatgccagacctaatatgagctgccaccaacacccctagaactttcagccatggtgtcttcagaattgtagcgcatttctgaatctagcaaatcctccttttacccgttgaatgttttgaatgccctgactctaccagcgcccataaatgatctctagaaggactgttagtaccaatctgtttttcaactttgaagctaaaaaccctgatatggtaatattatggtgcatagcagaggtctcggaaaaaaaatatttctgttcactttactttcaggttaaaaatgtttctaacacgcttgcaacttcccttatggcattaatcttgttgagggagagagacagaatcctggactctccaaagtatttaactgaaagtagggcctgctctgacagggcccatgtcccacaaggctgcttggcctcagtgggtgcttggctgtgctggatgatatgttgatctgtattggataaggaccaatgacagcaaagcaaaaatggctttaaagcttggtgttacttttcttaagttgtttaattatagttaagcaatttcaaaaatgctccaaagaaatgtgaaaggaccttttgtcacagcacttcagaaaatacacaacagccccttctgcccccgcacagaaatgctgcagagtatataaaacttgagacatttttgtaggatgcctgacgaggtgtagccttttatcttgtttccggatgcatatttattacgagtactctggttaaatattgaaaagttatatgctgtagtttttagtattttgtctttgtaatttacagaagttattggagaaaataaacttgtttcattttgcaaaaaaaaaaaaaaaaaaaaaaaaa

SEQ ID NO: 435 - DNA, 4305 bp, Homo sapiens
agatgccgcctggcaccaagcgcagccgccgctgccgcactttccacttgtattgatcacctctcagccccgcgcagccggctcgcccgagcggaccgcggccagcgcgccagcccttggcagccccggagcagtcgggctccgggaggaaactccttgggagcgccctgtccggggtgccctctgcgctctgcagtgtctttctttctgcctgggaggaggaggaggaggaggaagaggaggaggaggaggaggaggaggaggaagaggaggaggaggaggaggacgtctggtcccggctgggaggtggagcagcggcagcagcagcagccgccgccgccgccgccgctgccgccgccgccggaaagggagaggcaggagagcccgagacttggaaaccccaaagtgtccgcgaccctgcacggcaggctcccttccagcttcatgggcaaagtgtggaaacagcagatgtaccctcagtacgccacctactattacccccagtatctgcaagccaagcagtctctggtcccagcccaccccatggcccctcccagtcccagcaccaccagcagtaataacaacagtagcagcagtagcaactcaggatgggatcagctcagcaaaacgaacctctatatccgaggactgcctccccacaccaccgaccaggacctggtgaagctctgtcaaccatatgggaaaatagtctccacaaaggcaattttggataagacaacgaacaaatgcaaaggttatggttttgtcgactttgacagccctgcagcagctcaaaaagctgtgtctgccctgaaggccagtggggttcaagctcaaatggcaaagcaacaggaacaagatcctaccaacctctacatttctaatttgccactctccatggatgagcaagaactagaaaatatgctcaaaccatttggacaagttatttctacaaggatactacgtgattccagtggtacaagtcgtggtgttggctttgctaggatggaatcaacagaaaaatgtgaagctgttattggtcattttaatggaaaatttattaagacaccaccaggagtttctgcccccacagaacctttattgtgtaagtttgctgatggaggacagaaaaagagacagaacccaaacaaatacatccctaatggaagaccatggcatagagaaggagaggtgagacttgctggaatgacacttacttacgacccaactacagctgctatacagaacggattttatccttcaccatacagtattgctacaaaccgaatgatcactcaaacttctattacaccctatattgcatctcctgtatctgcctaccaggtgcaaagtccttcgtggatgcaacctcaaccatatattctacagcaccctggtgccgtgttaactccctcaatggagcacaccatgtcactacagcccgcatcaatgatcagccctctggcccagcagatgagtcatctgtcactaggcagcaccggaacatacatgcctgcaacgtcagctatgcaaggagcctacttgccacagtatgcacatatgcagacgacagcggttcctgttgaggaggcaagtggtcaacagcaggtggctgtcgagacgtctaatgaccattctccatatacctttcaacctaataagtaactgtgagatgtacagaaaggtgttcttacatgaagaagggtgtgaaggctgaacaatcatggatttttctgatcaattgtgctttaggaaattattgacagttttgcacaggttcttgaaaacgttatttataatgaaatcaactaaaactatttttgctataagttctataaggtgcataaaacccttaaattcatctagtagctgttcccccgaacaggtttattttagtaaaaaaaaaaaaacaaaaaacaaaaacaaaagatttttatcaaatgttatgatgcaaaaaaagaaaaagaaaaaaaaaaagaaaagaaaacttcaattttctgggtatgcacaaagaccatgaagacttatccaagtgcatgaccggatttttgtggttttgttcattttgtgtttaatttgtgttttttttttccagctgtatgaaatgggctttctgaagtttaaatagtccgacttcacccatggtgttctgtgcttgcagtgcgagtgttgctgtaattcagtgttgccgtcagtgtctcttttcttagctttctgtctttctttcaacgtagtgtgaagtgtcttatccttttctatgaattccaatttgccttaactcttttgatgctgtagctgtttcagtaaaagttagttcaaactaatgatgtagaatgctttgaccaaatgagctggtctattatgccttgtaaaacagcagcatagggcttttaaaaggtagtcaataaaagttgctgaaattttggcttttttaaatatgtagtaggtgtttttaatgatttttcacataatgtgtaaggtagtgaaatgcaagaagggaaaaatgttttgtgtgaaacacattttctgactggggaacttttattagggtaaattgtttgtaaggctgtacgccaacagtttcctctgatagtttgactgatttaggatatctgctgtatgatgcaatgtaaagtcttttttgccttttttcaggaaaaaaaaaaagctaacttgatgtactagatttagtgtaggtagtgttggggttggggatgggggtgggggaggggagtcactgaatgttttgtccttcctttatactaatgatagtgctttagaatgagaattatgcctgaaatctggcaaaccgaaaaatgttgctattgcaacaaagtggcaaaagctaaaagtaaggatttatcttcaaacataagctgagataacgaatagaagcaaaacgattggctactagctctctctctctctctctattaggtaaatttgaaaaataaaaatgacttggcacttttaaaggtaacttcaccaaagaccgaagagccagtaaccagtagctccaacttgtctcagcatcacatcttctgtgctctttatttttgccggaccagtttgcggttaggagaatgtgccttttttgtacctttgcatttaggttttataattttaattgatgtatggacacacacaaacaaaaaagcatgaaggaagatttggatccaagcagtgccacactttacatcatcactacaagtgttcaagtgtaaagaaaaccaattttgaaactatgaaattcctgattcataaatacacagttatttctactttagtacatataagataattcactgttattaaagctcttttattaaggcaattgcatatgttttaaaagcaatggtaaattaagttgtcttccaaaactgtgtacttgtctggtcagctgtgtatgatcagttatctacctcagagtctattttcttttgtgctgggacaggttgctggccctccctgtttccacagaccaaatcctcctagctcaggagctagggctaagcagttatttctttcaagtattttttagttcttaaattttatgcttgtatttgatgatagatgtcagtgacatttcatagtttcaaaagtccttgctgctctgagaagtgtagattctagtgaaaattacatagtcataagagaaatgtgtttttgtttttgtttttgtttcatttttttaaagttgtggtattattggttctatgctccctggaatattactgctttgtgaaagtccagactgaacgcagcaccctctgtgtacctagtacagttataaacctgggtctctcactacttgatatttttgcattagttaagacagaaatttgatagctcggttagaggggaggggaaatctgctgctagaaatgtctgaactaagtgccatactcgtctgggtaagatttgggaaacataacctctgtacataaaaaaaaaaaaatcagttaaacatcacatagtagacagccattaaattataaaaaaattaatttatgaagaaagaccttttgtacagattgaaaaaaaaagattttcatagagatatctatatgatcaagagagttaattttttatttttgttttactagtgccacagacttgccagtggtaacttatttgtccggttcaagataactctgtagttttctttcctaggacttgttgttaaacgccaaaagacatttttgaactgtacatttgatcagattgttagcttttctgttttatttcttttgagaacctttgaataaaaaacatctgaaattttaaaaaaaaaaaaaaaaaaaa

SEQ ID NO: 436 - DNA, 4474 bp, Homo sapiens
gttgttgtgaggcgactgcgctactgccggagcggggcggttatggcggctccatattaacagcctcctcctcctccgccgccgccgccgtctcctcctcctcctcctttccctcccgcccgcgctctaagccatctccgccttcaccctgacgcctgcctcttcccctcacctttccccctcccctgttctaccatgcccggcatgatggagaaagggcccgagttactggggaagaaccgatcggccaacggcagcgccaagagcccggcaggcggcggcggcagcggcgcctcgtccaccaacggcgggctgcactactcagagcccgagagcggctgcagcagcgacgacgagcacgatgttgggatgagagtcggagccgaataccaagctcggatccctgaatttgatccaggtgctacaaagtacacagataaagacaatggagggatgcttgtatggtctccatatcacagtatcccagatgccaaattggatgaatacattgcaattgcaaaggaaaagcatggctacaatgtggaacaggcacttggcatgttgttctggcataaacataacattgagaagtcccttgctgatctccctaatttcactccctttccggatgagtggacagtggaagataaagtcctatttgaacaagcctttagttttcatggaaagagctttcacaggattcagcaaatgcttccagataagacaattgcaagccttgtaaaatattactattcttggaaaaaaactcgctctaggacaagtttgatggatcgccaggctcgtaaactagctaatagacataatcagggtgacagtgatgatgatgtagaagaaacacatccaatggatgggaatgatagtgattatgatcccaaaaaagaagccaaaaaagagggtaatactgaacaacctgtccaaactagcaagattggacttggaagaagagagtatcagagtttacaacatcgccatcattctcagcgttctaagtgccgtccacctaagggcatgtatttaacccaggaagatgtggtagcagtttcctgtagtcccaatgcagccaacaccatcctgaggcaactggacatggagttgatctctctaaaacgtcaggttcagaatgctaagcaagtaaacagtgcacttaaacagaaaatggaaggtggaattgaagaattcaaacctcctgagtcaaatcagaaaattaatgcccgttggaccacagaggagcagcttctagcagtgcaaggtgtccgcaaatatggtaaagattttcaagctattgcagatgtaattggcaacaagactgttggccaagtgaagaacttctttgtaaactacaggcgtcggtttaacttagaggaggtattgcaggagtgggaagcagaacaaggaacccaggcttctaatggtgatgcttctactttaggggaggagacaaaaagtgcttctaatgtgccatcagggaagagcactgatgaagaagaggaggcacagaccccacaggctcctcggacactgggtccatcacctcctgccccatcatccactccaacaccaacagcccctattgccactctgaaccagcctccaccacttcttcgtccaacactgcctgctgccccggctcttcaccggcagcctcctccactccagcagcaggctcggttcatccagccccggccaactttaaatcagcctccaccacctcttattcgccctgctaattccatgccaccccgtctaaacccaagaccggtgttgtccacggttggtggtcaacagccaccatcacttattggaattcagacagattcacagtcctcactgcactaaaaattaaattggacacagctgcagtaacttttcaccccatcattataccagtgctcatctgactgatgaaaaagaggaaagaataatcatttctagatactgaggctgcgaactagttctgtggcagtggactagcataagtggatgtctaagaaatttttcagttcactagactaaaatgttttacaacaaaaagcctccagttagcctcctttctagagtatatgttcagcaatgttgatctcataaaaggaaaaacaaaagatttaagtattctatataccaagtttttgttttgtttttactgtatttattttattgaggttctttatattcctgcctcttcatagtcaaggctcttagtacaggaatattgacttaggaattgtgaaaactccttaagtttcttaagttaaggatgtttggcttttttctttaattttttaaaaaccattttcctatgttaggagtgcaagaatagccagcatttccgattttgacatatgttcattttatgcatatttaagaaattatagctgcatatcccttctttcaaaaaatgttgcttttttttttaaaggaattttaatatattcctttaaaagaaagcaatttaatcaattgcaaagcaattatataaaaccacaaagaatgtactgaacctactaaccctttaacatacagtttagggtcctagcgcagagtccttgtttaaaggtcattgactcatcatctgtcagtaatgagaggattggaagaataattttgcatacaaatgaggacttaatttgttgaaatataatctctttaagttccttgaaaatggagttggttttttttgtttctaaatgctatctgcttttaactagtagttgcctacatctggggacttcagagaagaattatattttgttagttaagtagacacagtggttatggaagcatttctttacagtaccctttacatgtttggtttctgaacttaaaattgccctcatacttaataatatggtctgcatttaatatgaaaggtgttttattgataaatctattgtactatttggatacatttgtgtattccttgcagccaacctgtattcgtgggattggtgtagggttaaatcatcaacattatttcataaaataagaatttgttctgtgttatctaaagatgtatcagtatattgtcacagttgtgctgttaactaaaaatgctgagacccctttttatagaaaaacaaaaagacatcaagtcttcttaattcaacccataatcattaagtacttaacaaagaatattttacaagtgatagtatttcaacaatgtgtaattaatatttttgatacagtgatttcatattggaatcattatttgtgcaaagggacagacagatcacttagattgctatactagtggacataggctacatgtttgcacattcacattcttatcacgtgtagaatacttcacaaaatagtcaacatctaaggccctaatttatgttttgaaagatcatgtgttcccaaagtattccctattgttggctccacagccttaaagtgctatagatttaaattcattgattagttttaatttttaattttagactgtgtatttccataaataccctacgtactggcatatttgaaactctttttccaggttaggtccttttctttctcattgaatcatcttaaatagttcttggccctgaatttagctgatttaaaattcttaatattcaagaatttatacttattttttccttaaaagccacaggggacagttaaatatcttaaaatatctaaaacattttttaaagcacttagattgtcttacgtatgtgcatactatacctttacagcgtttattgtcttgtctcttgtcagtagaccttcagtacacagtatgtgggatatgtcagtcaagttggtcagcaccagcatctgtccagctgttcagtatattgtgattcattaaaaaatctcttctatcccagacatgggccaaggtgctgtatctgagggatgtgctgtaatttgatttacatgcattagagcacacagtagaaaaactttagcttcattagtaatatgacacatgtatatagtgagatgtctttattgtgtgctttgcatattttgtaaatattttgcacgtcattatttttcttttttgtttaagcagtgtttggcctggaagagtgatatgcttgctgcttaatcaaaggattaaagatttaaagatgtctatgtcttctatttttatataatttcatgttctatgaggaatttagtacctcttcactgtgaaattcgaaataatgatttttataaaagcaaaactagaaatcttttaatgacaattttcattaatttcagggttatcatttttgagaaatctacaccaaagtggttttttaaaattacataactaaaaataaaccacactgtggatacatcttataaaactaatggaaacaatgtttttctatatgatttaattctagtgtaatatggatgaggtaagagtaagttatgatcaaactttttatgttcttaataagcttgcaattgagtaaaatagaatataaaataaaggtgaaataatataaaa

SEQ ID NO: 437 - DNA, 10854 bp, Homo sapiens
gcacgagatctgcgcctcgcctccctcctcacgcgggcggattttcttaccttgtgaaaaaccgtctcagcggctgcccccgcctcctctgctggatgtgaaatggcggtcggcgagtggttgcgtccgtgacatcatcatcatggcaacaagagctgcagcctgggaccgaggagcccgtgtgattcccggcggtggcggcagtggcggcagcaccagcaccgacgaaagctcgagggcttctctcctgcggccccttgccgggtgctcctgaggaggcggcggcagcagcgcctacaccgccccgcccgccgctcctcgaggtgcctctgtgtgaggggagggggccgtgccgagaaggggagggggcgccgccgccgctgcggagggagccgccgccgctgctgctgccgctgccgggtcgccagtgaagggaggcagtggcggcggcggcgaacatgttttcagtaaggatagtgactgcagactactacatggccagcccgctgcaggggctggatacctgccaatcccccctcacccaggcccctgtcaagaaggtgccggtggtgcgagtcttcggagcgaccccggcaggtcagaagacatgtcttcatctacatggcatctttccttacctctatgtgccatacgatggttatggacagcagccagaaagctatctttctcagatggcattcagtatcgacagagcacttaatgtggctttaggcaatccatcttccactgctcagcatgtgttcaaagtgtcattagtatcaggaatgcctttttatggttatcatgagaaggaaagacactttatgaagatctatctttacaatcctacaatggtgaaaaggatatgtgaacttttgcaaagcggagccataatgaataaattttaccagcctcatgaagcgcatattccctacctcctacagctcttcattgactacaatctttatggcatgaatttaataaatctggctgctgtcaagttccgaaaagcaagaaggaaaagtaatacattgcatgcaactggatcctgcaagaatcatttatcaggaaattctcttgctgatactttatttcggtgggaacaagatgaaataccaagctctttaatattggaaggtgttgaaccacagagtacatgtgaattagaagtggatgctgtagctgctgatatcttaaatcgtctggacattgaagctcaaattggtggaaaccctggtctacaggccatatgggaagatgaaaagcaacggcgaagaaacagaaatgaaacttctcaaatgagccaacctgagtcacaagatcacaggtttgtgccagcaacagaaagtgaaaaaaaatttcagaagagacttcaggaaattctcaaacagaatgatttctctgtaacattatcaggatctgtggactacagcgatggatcccaggagttctctgctgagttaacattgcactctgaggttctgtctcctgaaatgcttcagtgtacaccagccaatatggtagaagttcacaaagacaaagagtcaagcaaaggtcacactagacacaaagtggaagaagctcttattaatgaagaagcaattttgaaccttatggaaaatagtcagacttttcagcctttgacccaaagactgagtgagtcacctgttttcatggacagtagtcctgatgaggctctggtacatcttcttgctggtttggaaagtgatggatatcggggggaaagaaataggatgccatcaccatgtcgctcctttggaaataataaatatccacaaaatagtgatgatgaagaaaatgaaccacagattgaaaaagaggaaatggagcttagtttggtgatgtcccagagatgggacagcaatattgaagaacattgtgccaaaaagagatcactgtgcagaaatacccacagaagttcaactgaagatgatgactcatcttcaggagaagaaatggaatggagtgataacagtttgcttctagccagtctttctatacctcagttagatggaactgcagatgaaaatagtgacaatccattgaacaatgaaaattctagaacccactcttctgtaattgcaacaagcaagctttcagttaaaccctccatctttcacaaagatgctgctacattagaaccctcatcttctgctaagattacctttcagtgtaaacacacaagtgccctttcttcccatgttttgaacaaggaagatttaattgaagacctttcacagacaaacaaaaatacagaaaaaggtctagataactcagtcacttcttttacaaacgaaagcacttattctatgaaataccctggatctttaagcagtactgttcattcagaaaattctcataaagagaatagtaagaaagagatcctcccagtatcttcctgtgaaagtagtatttttgattatgaagaagatattccatctgttacaagacaagtaccaagtagaaaatatacaaacattagaaaaatcgaaaaggattccccttttatacatatgcaccgtcaccctaacgagaatacattgggcaaaaattctttcaacttttctgacttaaatcattcaaaaaataaagtatcctctgaaggaaatgaaaaaggaaacagcacagctctgagtagtttattcccttcatcatttactgaaaattgtgaattactgtcatgctcaggggagaatagaactatggtgcattctcttaatagcactgctgatgaaagtggactaaataaacttaaaattaggtatgaagaatttcaagaacataaaacagaaaagccaagcctcagccagcaagcagcacactatatgttttttcccagtgttgttctttctaactgtcttactagaccacagaaactatctcctgtcacatataaattacaacctggcaataaaccatcccggttaaaattgaataaaaggaaacttgcaggtcatcaggagacttctaccaaaagtagtgagactggatccacaaaagataattttatacaaaataatccttgtaatagtaatcctgagaaggataatgcattggctagtgatttaactaaaaccactcgtggagcttttgaaaataaaacacccacagatggttttatagactgtcactttggagatggaacgttagaaactgagcagtcctttggactatatggaaataaatacacacttagagccaaacgcaaggtaaattatgagactgaagacagtgagtcaagttttgtaactcacaactcaaaaattagtctacctcatcccatggaaattggtgaaagtttagatggaactctcaaatcccgaaaacgaagaaaaatgtctaaaaagctgccccctgtcatcataaagtatattattattaatagatttagagggagaaaaaatatgcttgtgaagctaggaaaaatagactctaaagaaaaacaagtaatattaacagaagaaaaaatggaactatataaaaagcttgcacctttgaaggacttttggccaaaagttcccgactcccctgcaaccaaatatcccatttatccactaacaccaaagaaaagtcacagaagaaagtcaaaacataaatctgctaagaaaaaaactggtaaacaacaaaggacaaataatgaaaatattaaaagaactttgtctttcaggaaaaaacggtcacatgctattctttctcctccctcaccatcttacaatgctgaaaccgaagattgtgacctgaattatagtgatgttatgtctaaactaggttttctttctgagagaagcacaagtcccataaattcttctccacctcgctgctggtctcccacagatccaagagctgaagaaatcatggctgctgcagaaaaagaggcaatgctttttaagggtcctaatgtatataagaagactgttaattctcgtataggaaaaactagtcgcgcaagagcacagattaagaaatcaaaagcaaagcttgctaatccctctatagttactaagaaaaggaacaaacgaaatcagacaaataaactagtagatgatggaaaaaagaaaccaagagcaaaacaaaaaacaaatgagaaaggtacatcgagaaagcatacaacacttaaggatgaaaaaataaaatctcagtctggtgctgaggttaagtttgtactgaaacaccagaatgtgtctgaatttgcaagtagttctggaggctctcaactactttttaaacagaaagatatgccactaatgggctctgctgtagatcatcccctttctgcttccctacccactggaattaatgcacaacagaagttatctggctgcttttcttctttcttagaaagcaagaagtctgtagatttgcagacattccccagttcacgagatgatttgcatccatcagttgtttgtaattctataggacctggagtctcaaaaattaatgttcaaaggcctcataatcaaagtgctatgtttactctaaaggaatcaacgttaattcaaaaaaatatatttgacctttccaatcatttatctcaggtagcacagaatacacagatatcttctggtatgtcctcaaagatagaagataatgcaaataatatacaaagaaactatttgtcatcaatcggaaagttaagtgaatatcgcaattccctagaatcaaagctggaccaagcatatacccctaattttttgcattgcaaagacagtcagcagcagattgtgtgcatagcggaacagtcaaagcacagtgaaacttgttctccgggaaatacagcttcagaggaaagccaaatgcctaataattgctttgtaacttccttgagaagtccaatcaaacaaatagcatgggagcaaaagcaaaggggctttattttagatatgtcaaattttaaacctgaaagagtaaaaccgaggtcgttatcagaagcaatttcacaaaccaaagcactttctcagtgtaaaaatcgaaatgtgtcaacaccttcagcatttggtgaaggacagtctggactggcagttctaaaagaattgttacaaaaaagacagcagaaagcacaaaatgcaaatactacacaagacccattatccaataaacatcaaccaaataaaaatatttctggttcccttgagcataacaaagcaaataaacggacacgatcggtaacgtccccaagaaaacctcgaactcccagaagtacaaaacaaaaagaaaaaatccccaaacttctcaaagtagactctttaaatttacaaaactctagccagttggataactctgtatcagatgatagtcccatctttttttcagatccaggctttgaaagttgttactcacttgaagatagtttatctcctgaacataattataattttgatattaacacaataggtcagactggattttgtagcttttattctggaagtcagtttgtcccagctgatcagaatttgcctcagaagttcctaagtgatgctgttcaggatctttttccaggacaagctatagaaaaaaatgagtttttaagtcatgacaaccagaaatgtgatgaagacaagcatcataccacagactcagcctcatggattagatctggtactttaagtcctgaaatttttgagaagtcaaccatagatagcaatgagaatcgtcgccacaaccagtggaaaaatagctttcatcctctaacaactcggtctaactcaataatggattctttctgtgttcagcaggcagaagactgtctaagtgaaaaatctagattgaataggagttcagtaagcaaagaagtgtttcttagcctcccacagccaaacaattcagactggattcaaggtcacaccagaaaagaaatgggacagtctcttgactcagccaatacctcttttactgcaatactctcctcccctgatggtgaacttgtagacgtggcctgtgaagatttagaactgtatgtttcaagaaacaatgatatgttgacaccaactcctgatagttcaccaagatctactagctctccttcacaatctaaaaatggcagcttcacccctcgaactgctaacattctgaaaccacttatgtcccccccaagtagggaagaaattatggcaactttgttggatcatgacctgtctgagactatttaccaggaaccattttgcagtaatccttctgatgtaccagaaaagcccagggagattggtggacggctcctcatggtagaaactcgacttgcaaatgatctggctgagtttgagggagacttttccttggaaggacttcgtctttggaaaacagcattctcagcaatgactcagaatccaaggccagggtcaccccttcgcagtggccaaggagttgtcaataaagggtcaagtaatagccctaagatggttgaagataaaaaaattgtgattatgccttgcaaatgtgccccaagtcgacaactggttcaagtgtggcttcaagccaaagaagaatacgaacgttccaagaaactgcctaaaaccaagccaactggagttgtaaaatctgctgagaactttagctcttcagttaacccagatgacaaacctgtagtgcctccaaaaatggatgtaagtccatgtatactccccactacagcacataccaaggaggatgttgataattctcagattgctttacaagcaccaaccacgggatgtagtcaaactgcaagtgaaagtcagatgctgccaccagttgcctctgcaagtgatcccgaaaaagatgaagatgatgatgataactattacattagttatagctcccctgattctccagtaattcccccttggcaacaaccaatatccccagattccaaagcattaaatggagatgatagaccctcatcaccagtagaggagctgccttcattggcttttgagaacttcttaaagccaataaaagatggtatacaaaaaagcccctgcagtgagcctcaagagcctctagtgatatctccaattaatactagggcaagaactgggaaatgtgaatcactttgctttcatagtacaccaatcatacagagaaaacttctggaaaggcttcctgaagcacctggccttagcccattatcaacagaaccaaaaacacagaagttgagtaataagaaaggaagtaatactgacactcttagaagagtactgttaacacaagcaaagaatcaatttgcagcagtaaataccccacagaaagaaacttctcagattgatggaccatctttaaacaatacttacggtttcaaagtcagcatacaaaacttacaggaggcaaaagctttacatgagatacaaaatcttaccctaatcagtgtggagttgcatgctcgaactagacgagacttagaaccggatcctgaatttgacccaatctgtgctctgttctactgcatctcatctgacactccactgccagatacagaaaaaacagaactcacaggtgtaatagtgattgataaagacaagacagttttcagtcaagatatcagatatcagactccattacttattagatctggaattacaggactcgaagtcacctatgctgctgatgagaaggcactttttcatgaaattgcaaatataataaagaggtatgatcctgatattctgctaggatatgagattcagatgcattcctggggttacctcttacaaagggctgccgctttaagtattgacttatgtcggatgatctctcgggtgccagatgacaaaattgagaacagatttgcagctgaaagagatgagtatggatcatatacaatgagtgagataaatattgttggccgaattacactaaatctttggagaatcatgagaaatgaggtggctctaactaactacacctttgaaaatgtgagctttcatgttcttcatcagcgttttcccctctttacctttcgagtcttgtcagactggtttgataacaagacagatctatacagatggaaaatggttgatcattatgttagccgtgtccgtggaaatctccaaatgttagaacagctggacctgattgggaaaaccagtgagatggctagactttttggcattcagtttttacatgtactgacaaggggttcacagtaccgtgtggaatcaatgatgttgcgtattgctaaaccaatgaactatattcctgtgacacctagtgttcagcaaagatcccagatgagagccccacagtgtgttcctctaattatggagcctgaatcccgcttctatagcaactctgttctcgttttggatttccaatcactttatccttctattgtgattgcatataactactgcttttccacctgccttggccatgtggagaacttgggaaagtatgatgagttcaaatttggctgtacctctctgagagtacctccagatttactttaccaagttaggcatgatatcacagtgtcccccaatggagtagcttttgtcaagccttcagtaagaaaaggtgtactaccaagaatgcttgaagaaattttgaagactagatttatggtgaagcagtcaatgaaggcttacaagcaagacagagccctgtcacgaatgcttgatgcgcgtcagttgggacttaagctgatagcaaatgtcacatttggctatacatctgctaatttttctgggagaatgccatgcattgaggttggcgatagtattgttcacaaagccagagagaccttggaacgagctattaaactggtgaatgataccaagaaatggggggctagggttgtatatggcgatactgacagtatgtttgtgctactgaaaggagccactaaggagcagtcttttaagattggtcaggaaattgccgaagctgtaactgctaccaatcctaaaccagtgaaattgaagtttgaaaaggtatatttgccctgtgttttacaaacaaaaaagaggtatgtgggttacatgtatgaaacactggatcagaaggacccagtatttgatgcaaaaggaatagaaacagtcagaagagattcctgccctgctgtttctaagatacttgagcgttctctaaagctgctatttgaaacgagagatataagtctaattaaacagtatgttcagcgacaatgtatgaagcttctggaaggaaaggccagcatacaagactttatctttgccaaggaatacagaggaagtttttcttataaaccaggagcttgtgtgccagcccttgaacttacaaggaaaatgctgacttatgaccggcgctctgagcctcaggttggggagcgagtgccatacgtcatcatttatgggacccccggagtaccacttatccagcttgtaaggcgcccagtggaagtcctgcaggacccaactctgagactgaatgctacttactatattaccaagcaaatccttccacccttggcaagaatcttctcacttattggtattgatgtcttcagctggtatcatgaattaccaaggatccataaagctaccagctcctcgcgaagtgaacctgaagggcggaaaggcactatttcacaatattttactaccttacactgtcctgtgtgtgatgacctaactcagcatggcatctgtagtaaatgtcggagccaacctcagcatgttgcagtcatcctcaaccaagaaatccgggagttggaacgtcaacaggagcaacttgtaaagatatgcaagaactgtacaggttgctttgatcgacacatcccatgtgtttctctgaactgcccagtacttttcaaactctcccgagtaaatagagaattgtccaaggcaccatatctccggcagttattagaccagttttaaattgtcaatatcacagtattacaggtgctatttttttcagtgcttaccactaaactgttgtgcatggtgctttttaactttcatcgagtcaaggatgttcactgtctgttatctgaagactatgaagacttctatgctaaccgaattaaaatgtacttgttgatctctgaatagctcacttcttacaatgtacaaattcctcattctgtcaccttttaaacattgttttataatgcaggtgttggatttgctccagtatgtgtaccatcttgtaaattcatttgagtagatcatgtttacttcccagtggaaggagcactgaaaacctcttaaagaaaaagcatttgtgtgttttccttgaactgtctgtatcaagacgtgttacttcgagatatccattcactttataattttgactgcaaaatattttgtaaatacacttttttacttttcaaacgagcaaaataatgtgcaatgatttttatacaaatgattttcaagttgtttggtatatttcctctaggttttgcttgactcaaagtagatcgttattttgatcaaactgtgcaaacagtagtaccacgtgtagcattttgaaacattatttttttttaaaaaatgctgtcttgctttagctattaatggggcattgtgaggaactgtgcaaagacatttttgttacaaacctgtgggcctgttgcaatactttaaaaataaaaaattttattccatttgcttgttttgtatagacatttctattgcttctaaatatacttaaaatattttctttccttatgtactgtacagttaatcttatttgccatcatcttgaacacaaaatgtgtatttagaatatttgtataactgtgtaaaataaaaaaggaattatgtggtcagtgcattgttttttaaactggaaatcattttgttttaaaagttaataatggaaaccatattaaaattgaataaaatataaaataatataaaaaaaaaaaaaaaaaaa

SEQ ID NO: 438 - DNA, 2712 bp, Homo sapiens
taaagccgcgcagagagcgtgaaacaaagcagtcggctcggaattggacttgggaggcgcggtgaggagtcaggcttaaaacttgttggaggggagtaaccagcctgctcctctcgctctcctcctcgtctgcgccgcgtttcagagagaaaattcctgttccaagagaaaataaggcaacatcaatgaaggagagaagagccagccagaaattatccagcaaatctatcatggatcctaatcagaacgtgaaatgcaagatagttgtggtgggagacagtcagtgtggaaaaactgcgctgctccatgtcttcgccaaggactgcttccccgagaattacgttcctacagtgtttgagaattacacggccagttttgaaatcgacacacaaagaatagagttgagcctgtgggacacttcgggttctccttactatgacaatgtccgccccctctcttaccctgattcggatgctgtgctgatttgctttgacatcagtagaccagagaccctggacagtgtcctcaaaaagtggaaaggtgaaatccaggaattttgtccaaataccaaaatgctcttggtcggctgcaagtctgatctgcggacagatgttagtacattagtagagctctccaatcacaggcagacgccagtgtcctatgaccagggggcaaatatggccaaacagattggagcagctacttatatcgaatgctcagctttacagtcggaaaatagcgtcagagacatttttcacgttgccaccttggcatgtgtaaataagacaaataaaaacgttaagcggaacaaatcacagagagccacaaagcggatttcacacatgcctagcagaccagaactctcggcagttgctacggacttacgaaaggacaaagcgaagagctgcactgtgatgtgaatctttcattatctttaatgaagacaaaggaatctagtgtaaaaaacaacagcaaacaaaaaggtgaagtctaaatgaagtgcacagccaaagtcatgtataccagaggcttaggaggcgtttgagaggatactcatctttttggaatcctgaccttaggttcggcatgtagaccaagtgatgagaagtgaatacatggaagagtttttaagtgtgacttgaaaaatatgccaaaaaatgagagatacaaatgagctagaggaagatgaggggggatgcgagtacctccaagaagaaaaatcacactctgaatggtgcttgcatttttgggttttttttttttgttataatctattcatggatctccactttgatttaatttttaaatgttttaatctcctttacaaaaagtatacgttaatataccgtcctcaagggggaactggcactgtgaccttagcatttagttttctagaggatgtgatctaatttctttctagctcatcattaaaaaggaaattgtatcaggacccatgggatatatccagaggcaaactttatgaggctttgaaatcttgccttcctgaagatagctgagtaggatggttctaaggaaagcctttgcaatcttgcaagatttgtagaccagcactacaaagatcgcatagatcaaataggaaaaaaaatgtcgatttttattcagtctgatggttctgttcttcattgtgattgtcattaaaaagtggtaaattgctcaatgtaatatttttgtgcgctgtttagaagttgtgtgattttttgccatcgttgataaaaatgcaaagtcaaataaaaggtgtcttggtttgatgtcatagaatgatccaaggagagaaaaaaggtagttactgttttcaccagaaaaggtaatgagtgaaggaaagaatagtagcagaaagcacagtttgtgagtaaagctgtctggaattaagttaccaaaaatacaaagcaaaaggactattattttgggttgaagctccaaaactgacagcatctgataatctgttggtttatttcacttttcattaaatgaacattgatgagagaagatgccacttacccaagctttagagaatccctagtggaagattatatgataaactttcagtcctgacataacactagggcatttctagagtgtcattgctaaaacctcactgaacagatgcagccaaggtctgtgttcagcacttggtctctgttgttacgtaaaataataagcatttaaaatagtttacagatatttttgaccagttccttttagagattctttcagagaagaaaccagatctgacctgtttattgttggcgcttgttgaaaacgagctttctttcccatgatagtgcttcgtttttgaagtgttgaagctgtgctccccttaaatcgtggcaggagagattaaggtaattacaacactcagttctatgtcttacaagcactttgtcttgtctctgcaagaaaattcgattccagtcatttcccataaaatacagacattttaccaacataatatgctttgattgatgcagcattatgctttgggcagtattacaaaatagctggcgagtgctttctgtatttaaatattgtaaaaagaaaataagttataactgttataaagcagaacttttgttgcattttttaaactgttgaagtcactgtgtatgtttgtttggtcaatgtttccgcagtatttattaaaacatactttttttttcttcaaataaaaaagtaaccatgtctttgtctaaa

SEQ ID NO: 439 - DNA, 4425 bp, Homo sapiens
ggccgggggcgggaggaagaagtgggaggaggaggaggggaaagcgggggctgcgggagggggaggtggtagttgcggcgctggttcccgggagcagccgtcgagccacaactgcggaggaggagttcgggaaagcggccgtcgggactcctcccctccgtcgtctccgccccggttgagaggcgcctcggcgcatcggagggaccctcccccgcgcttcctcaggctgctgtcgccgctgctgggagatgggcctactcgcccgccaccctgcgctgccgccgctctgaggagttaaagaacatccatgatagcagtcttctgtaaatcgaacttttcaagaattctctgaaggaaccaagtaggatattcttacatcatgacttaatgtgaatgcaagaacaagaaataggttttatctctaaatataatgaagggctgtgtgtaaacactgaccctgtctcaattctaacaagcattttagacatgagtttacatcggcaaatgggttcagatcgagatcttcagtcctctgcttcatctgtgagcttgccttcagtcaaaaaggcacccaaaaaaagaagaatttcaataggctccctgtttcggaggaaaaaagataacaaacgtaaatcaagggagctaaatggcggggtggatggaattgcaagtattgaaagtatacattctgaaatgtgtactgataagaactccattttctctacaaatacctcttctgacaatggattaacttccatcagcaaacaaattggagacttcatagagtgccctttgtgccttttgcggcattctaaagacagatttcctgatataatgacttgtcatcacagatcttgtgtggattgcttacgacaatatttaaggatagaaatctctgaaagcagagttaatattagttgcccagaatgtactgaacggtttaatccccatgatattcgcttgatattaagtgatgatgtcttgatggaaaaatacgaagaatttatgcttagacggtggcttgttgcagatcctgattgtaggtggtgtccagctccagactgtggatatgctgtgatagcatttggatgtgccagctgtccaaaattaacttgtgggcgagagggctgtggaacagagttttgctaccactgtaaacagatttggcaccccaaccagacctgtgatgctgctcgacaagagagagcccagagcttacgtttgagaactatacgttcttcatccattagttatagtcaagagtctggagcagcagctgatgatataaagccatgtccacgatgtgctgcttatataataaagatgaatgatgggagctgcaatcacatgacatgtgctgtttgtggttgtgagttttgttggttgtgtatgaaagaaatctcagatttgcattatctaagtccatcaggatgtactttttgggggaagaaaccctggagccgaaagaagaaaatattgtggcaactgggaacactggttggtgctcctgtcggaatcgctttaatagctggcattgctattcctgcaatgattattggcattcctgtgtatgtgggccgcaagattcacaatcgctatgaaggcaaggatgtttcaaagcacaaacggaatttggccatagcaggtggtgtaacgttgtctgtaatcgtgtctccagtagtagctgcagtgactgtaggtatcggtgttcctattatgttagcttatgtctatggcgtagttccaatttctctttgtcgaagcggaggttgtggagtctcagcaggcaatggaaaaggagttaggattgaatttgatgatgaaaatgatataaatgttggtggaactaacacagctgtagacacaacatcagtagcagaagcaagacacaacccaagcataggggagggaagtgttggtgggctgactggcagtttgagtgcaagtggaagccacatggatcgaataggagccatccgagacaacctgagtgaaacggccagcaccatggcactagctggagccagtataacggggagtctgtcaggaagtgccatggtaaactgttttaacaggttggaagtacaagcagatgtacagaaagaacggtacagtctaagtggagaatctggcacagtcagcttgggaacagttagtgataatgccagcaccaaagcaatggcaggatccattctgaattcctacatcccattggacaaagaaggcaacagtatggaggtgcaagtagatattgagtcaaagccatccaaattcaggcacaacagtggaagcagtagtgtggatgatggcagtgccacccgaagtcatgctggcggttcatccagtggcttgcctgaaggtaaatctagtgccaccaagtggtccaaagaagcaacagcagggaaaaaatcaaaaagtggtaaactgaggaaaaagggtaacatgaagataaatgagacgagagaggacatggatgcacagttgttagaacaacaaagcacgaactcaagtgaatttgaggctccatccctcagtgacagtatgccttctgtagcagattctcactctagtcatttttctgaatttagttgttctgacctagaaagcatgaaaacttcttgtagtcatggttccagtgattatcacacccgctttgctactgttaacattcttcctgaggtagaaaatgaccgtctggaaaattccccacatcagtgtagcatttctgtggttacccaaactgcttcctgttcagaagtttcacagttgaatcatattgctgaagaacatggtaacaatggaataaaacctaatgttgatttatattttggcgatgcactaaaagaaacaaataacaaccactcacatcagacaatggaattaaaagttgcaattcagactgaaatttaggcccataaatgctgcagaataattaccactgtacaaccgtgtttggagctggttgaactacatgtgactacttaagtttcaggttaccagcaaaagccgggtttcattatcataatgcagatacattttctgtgttcagcaaggcattgtgtgtcatgtggatcttagttaccaaactatgaagtgaaggctttaaaagtgcattattttaaggataataaatttgaagagcaaagcatgttttgtgtgtttgccacaaaacattgcttgaagcacatacttagatagaaattggtcttaatttatataatcaatataaaatactaatgcaattctacagcattcaaatgaagaaaacttgaggctttagggataagtggttagtgatattttattgaaaccactaaagagataagtttaaaagaactgcataggttactctcagtatatgatactctgtaacatttctatttatatcggcataaatttcattttttttcttcatatgcaatgtggttatataaagcttaatgcagctcatttgctaccatttggatacttagacactttgagcaagattgtggcagtttttgcacaactttgaaatagaaatacctggtactctatcttgtttattgttgatgccatcttagaggaaaaaatgtaaaggtaagtaattaagcatatgacagcaacaaataagatacataaaactacaaaataaagtcccattaggttataagtattacaaaaaatccacctttctctaaggggaagtttgtaccccattgattcttggtgcctttgggatcgactgggttttaatggcctagttatttgaggattttgctgtgttgttttccatgtcttctctggtcaccttggattatatataaaaatacaggaaatagataaacatgaatgtgattaataatgctgaaaaagtattagcctaccaaagacacactcaggctttagtgaataactttacataacctcagtttttaacacatgcatatcttctccaaccatgaaatcaaagcacggtgcagaacttgtaccaagtacaaaaggtccatgtatgattagcattattttcttttgcttttgtttatggacaatgttcagctgacataagcagaagttggccaaaatactgcctgtactgttaatttcctgtataattcacttaaataaaagcaggttaacctcaatgatagcagttaaaatgttctatcttatgtatttcttttaagtattaccattatggtgctactgagcgttttcttttggtaaaaagaaaaatgccatgggctgcagtcttcttccatcacttttccctaccaggtccattaatatgcttataacactagtgccagttattttatttgataatgcttatggtatttgtatatttgtttgcattccaattttgtttaataatgagtgtgtaaactgcatacgttaaataaatgtaaatactaatgtactgctgccaaaaaaaaaaaaaaaaaa

SEQ ID NO: 440 - DNA, 3831 bp, Homo sapiens
gggtcgtcagggcgacgaaaaaggggaaggggtgctgggcctggcgggcaaactaaggctgcggaccgttgggcggttccgcggggcgttgtccggagagctgcgaggccggggttcccagggttcacgccacactctaggaagtgcctgagctagtgagctggccaacgagctccgcgggctgggaccatgggctgcttcttctccaagagacggaaggctgacaaggagtcgcggcccgagaacgaggaggagcggccaaagcagtacagctgggatcagcgcgagaaggttgatccaaaagactacatgttcagtggactgaaggatgaaacagtaggtcgcttacctgggacggtagcaggacaacagtttctcattcaagactgtgagaactgtaacatctatatttttgatcactctgctacagttaccattgatgactgtactaactgcataatttttctgggacccgtgaaaggcagcgtgtttttccggaattgcagagattgcaagtgcacattagcctgccaacaatttcgtgtgcgagattgtagaaagctggaagtctttttgtgttgtgccactcaacccatcattgagtcttcctcaaatatcaaatttggatgttttcaatggtactatcctgaattagctttccagttcaaagatgcagggctaagtatcttcaacaatacatggagtaacattcatgactttacacctgtgtcaggagaactcaactggagccttcttccagaagatgctgtggttcaggactatgttcctatacctactaccgaagagctcaaagctgttcgtgtttccacagaagccaatagaagcattgttccaatatcccggggtcagagacagaagagcagcgatgaatcatgcttagtggtattatttgctggtgattacactattgcaaatgccagaaaactaattgatgagatggttggtaaaggctttttcctagttcagacaaaggaagtgtccatgaaagctgaggatgctcaaagggtttttcgggaaaaagcacctgacttccttcctcttctgaacaaaggtcctgttattgccttggagtttaatggggatggtgctgtagaagtatgtcaacttattgtaaacgagatattcaatgggaccaagatgtttgtatctgaaagcaaggagacggcatctggagatgtagacagcttctacaactttgctgatatacagatgggaatatgaagtgcaatgtggaaccaggacttggtattaagcctttcccaacttgtgaatatagaatttgataatacacttttgtgtattagcaatggtttttactaatgctaaaacttttaaagtttattttttaataaattgttgagtattacatcatttacttgaggttcaaaaataattcattttaaattaagtagttttaatcagcttaaaagctatttaacccattttaataagcttgcagttttgtttctctgcatatgatattcttattagaaaacagaagtagctaaaagtttattattttaatcctatttaaatgttctttcaaatctctaataatttaaactttcctcagtgctccatgatactttttttgagactccatatcattgcttattttacctttttcaatttagagggatttgttactagtcgatcaattagaatgaacctatgcacatttttatgtacacatatccagttatataattgcttcctagttgcattatatggcaaatgagattttgtacatggagttgacataatactttgtaaattgaattttttaaagaaataggcatttgataaccagcttggcaagtaactctactaacagatgttggtatagctatttaaagactacttcgtaagtagtatgattatttgaataaattacacattgtttagttttttaatacaactgctatatgactcttctgcttcctgataagaaaaggtatatgcaatgctaaaactgtagaagcccaatcaccagcagtttttaaaaaggtgataacttttattagctcttgtgggctatcaagagaattggaacaaaaccttgtgacttttaggtaagaaataggcatgatgataagctatgcagattattaaaaagcttgatacatttgatttttcattagatatgccattcatatcaagtaatgttcaagtatgataaaattattttggttgctttaaagcactgtttcccaaatctacctgatcataataatttaccaggaagcagaggagagctacttgtttaaaaatccacattcttggacccaatcctcagatgcacggattcagtcttcaggggaaactctgttttaaggggtatgttgtaatctaaagtaattggttcaggaggtgtcaataggttgaacttgtgagaaggcactgaatctgccatccacatcacatatagcagctattatgaaatcagctttcataggcctatttttaaaaggaatctgaaatttaattctattttgataaaactaagactgaaaataaccacttgtaaacattcctatgattgttactaaaatgtattttcatgtttaaaatgtttttggatatttttgggttaataactactacattgaattgcatgttaaggtgcagaaataatacattaaaagattttcactttaaattaattagtaatattgagcgctcaccctgtgcgtggccttgtgctaaccattagcactgcatcatttcaattcttttataagggcattcaatactacaaaatcaacatgatttcataaggtgcaaataaaagttggtgacagatttaatataattttgatcacaatttacaaatgatctttgcaaatagtggtcagacggcattagtttttcccttagttaagctaaattaaagggactccatcctgttatgattatattattattattattattattatttttgaggtggagtttcactcttgttgcccaagctggagtgcaatggcgcgatctcggctcaccacaacatccgcctcctgggttcaagcgattctcctgcctcagcctcctgagtagctgggaatacaggcatgcgccactacacctggctaatttttgtatttttagttgagatggggtttttccacgttggtcaggctggtctcgaactcctgacctcaggtgatccgtccacctcagcctcccaaagagctgggattacaggtgtgagctaccgcgcctggccatgatgatattattaaacaccattattcacatttcaaataataacaatactttttgtttttcaaaaataaaatgcaatgttatataaagctataaactaagttctttatgatatttgagcaacaactcaggaatataacatataagggagatgttaatttaaaaatttccactacacttattatctattaaccaaagcttaaaattttgtattcttctgttagataagaccttttacccatttaatttgtctttaaggacagtcatttggcttctgaatgtttgaaacgattttaaaaaataagtagtgctatggttgtttctataattctaacctttgatagtaatcagaatgtattacatttcatttctgaatagcttttgaatttatgaaaaattattaacaatgaaaaattggtaattttattaagttatatgtgtttaaatattatattagcttatttctcttgcattaatagtactgctgtttttgttttgcttctttatatttatgtctagcttttatatgtaatttatctagtgtttataaaatgtgatttgtaataaatgttgttaaaatgaaaa

SEQ ID NO: 441 - DNA, 1712 bp, Homo sapiens
ttttttttttttttccggtaggtcgccagctgaggcggtttgtaagttttgggtcgcagtatgctagaattttgaggctcccttctgatgaaaattgagctgtccatgcagccatggaacccgggttacagcagtgagggggccacggctcaagaaacttacacatgtccaaaaatgattgagatggagcaggcggaggcccagcttgctgagttagacctgctagccagtatgttccctggtgagaatgagctcatagtgaatgaccagctggctgtagcagaactgaaagattgtattgaaaagaagacaatggaggggcgatcttcaaaagtctactttactatcaatatgaacctggatgtatctgacgaaaaaatggcgatgttttctctggcctgtattcttccctttaaatacccggcagttctgcctgaaattactgtcagatcagtattattgagtagatcccagcagactcagctgaacacagatctgactgcattcctgcaaaaacattgtcatggagatgtttgtatactgaatgccacagagtgggttagagaacacgcctctggctatgtcagcagagatacttcatcttcacccaccacaggaagcacagtccagtcagttgacctcatcttcacgagactctggatctacagccatcatatctataacaaatgcaaaagaaagaatattctagagtgggcaaaggagctttccctgtctgggtttagcatgcctggaaaacctggtgttgtttgtgtggaaggcccacaaagtgcctgtgaagaattctggtcaagactcagaaaattaaactggaagagaattttaattcgccatcgagaagacattccttttgatggtacaaatgatgaaacggaaagacaaaggaaattttccatttttgaagaaaaagtgttcagtgttaatggagccaggggaaaccacatggactttggtcagctctatcagttcttaaacaccaaaggatgtggggatgttttccagatgttctttggtgtagaaggacaatgacatcaagagtagttgaaagtatcttgccactgttggccttttgatttttttttcccactttttcttgaaagattaagtaattttattttagttccattctagaatgttggggagtggggcacaagaaaaaatagtatagctgaaatgcatctgttaaaaatgtcatgattgaaagcagaactgagtttcaaattacaaccttaaaattgttgttagatatttcttcacatatcagctgcccattttgaaaaagaaattatccataaaggtaatgttggtgctccaatttgccagccattcccaacccccttctcccttacctgccttcactaaagaacccagaaaagctaattgctcccctttcagcctctgttgcaactaacaactctcagtggcctcaggacacagctttggccttgggaattctgggaaaacttttacttcctgattaaagatacatatgcagctaggccacctcctcccccccttactgccataaacaccaaagtgatgactggagctggaggagttatttgaaccacgacgaagggccaagagaaccacgaagatgccagttgccacattgttgagctgctgacccaacaccagccattgcctgtctctaaacatcttatgaaataaaaccagttttgtttaaaaaaaaa

SEQ ID NO: 442 - DNA, 6839 bp, Homo sapiens
attcttcattcagttgtgtgccttgtgggggatttttaaaaagtcgtttttttttttaaagaaacatttccgtgctactgtctgtcatcgtctctggggaaatcagccagaaccaccggaacgtaactgaaaccagacaagagaggcaggagcccaggcagtacctgcagcgtccgggcaccagagccaccttggaacaggaacgcgtctccggccgcggggctgcggctccgccaaactttggggcgggcggggcgggctggggcgcccagggggctctgtagaccgagggcggccccctaaccatgatgtttcgcgaccaggtcggggtgctggcgggctggtttaagggctggaacgagtgcgagcagactgttgcgctgctgtcgctgctcaagcgcgtgagccagacccaggcccgcttcctccagctctgcctggagcactcgctggccgactgcgccgagctgcacgtcctcgaacgcgaggccaacagccccggaatcattaaccaatggcaacaggaatccaaggataaagtgatttccctcctgttaactcatctgcctttgctgaagccaggaaacctcgacgcgaaagtagaatatatgaaactgctgcccaaaatcctggctcactctattgaacacaaccagcacattgaggagagcaggcagctgctgtcctatgctttgatacatccagccacttcgttagaagaccgtagtgctttagccatgtggctgaatcacttggaggaccgcacgtcgaccagctttggtggccagaaccgaggccgctcagactctgtggattatggacagacacactactatcaccaaagacagaactctgatgacaagctcaatgggtggcagaactctcgggattctgggatttgcatcaatgcctccaactggcaggacaaaagcatggggtgtgagaatggccatgtgcccctctactcctcctcatctgtccccaccacaatcaatacgattggaaccagcacaagtacaattctctcaggccaggcacaccacagccctttgaaacgatctgtgtcccttaccccacccatgaatgtgccaaaccagcctctaggacatggatggatgtctcatgaggacttacgagctagaggaccccagtgcctcccatccgatcatgcccccctgtctccacaaagcagtgtagcctcttcaggaagtggtgggagtgaacacttagaagatcagaccactgctcgtaacacattccaagaagaaggtagtgggatgaaagatgttccagcctggctgaaaagcctccgcctgcacaaatatgccgcgcttttctcccagatgacctatgaggagatgatggccctcaccgagtgccagctggaggcgcagaatgttaccaaaggtgcaagacacaaaattgtcatcagtattcagaagctcaaagaaagacaaaatctcctgaagtctttggaaagggacatcatcgaggggggcagcctgcgcatcccgctccaggaactgcaccagatgatcctgactccgatcaaggcctacagctccccgagcaccacccccgaggctcgccgccgggagccccaggccccgcgtcagccctcactgatgggccccgagagccagagccccgactgcaaagatggggccgcagccactggcgccacggccaccccctcggccggggccagcggggggctccagccgcaccagctgagcagctgcgatggggagctggccgtcgcccccctgccagagggggacctccccgggcagttcacacgcgtcatggggaaagtgtgcacacagctcttggtctccagacctgatgaggaaaatataagttcctatttacagctcatagacaagtgtctaattcatgaggcatttacagagacacagaaaaaaagattgttgtcatggaaacagcaggtgcagaagctctttcggtctttccctcggaaaacccttctagacatatcaggatatcgacagcaaagaaatcgaggctttgggcaatccaactccctcccgacggctggctctgtgggcggtggcatgggcagacggaacccgcgccagtaccagatcccctctcggaacgtcccttccgcccgcctgggcctcttgggcaccagtggattcgtcagctccaaccagcgcaacaccacagctacccccaccatcatgaaacaaggaagacagaacctgtggtttgccaaccccgggggcagcaatagcatgccaagccgcacccacagctcagtccagaggacccgctcgctgcccgtgcacacttccccacagaacatgctgatgttccagcagccagaattccagcttcccgtgaccgaacctgacatcaacaacaggctggagtcgttgtgcctcagtatgaccgaacacgccctgggagacggggttgaccggacctccaccatctagaagctgaagacgagagtgaccgcgctggccgtgaaatcgactgctgcgggtccagtgtccgccatcttcagggttgcacagaatcctccaagatactttgcagccttttttccccctggtccctctcccgttttgattttgtgagagcgtaggtcatcctcgtaaacatatcagtagacctggggttggttattttgtcatttgtttctgtcatgggatggtttggtgtgtggggtggggaggggtctctagggaattatgagactgggaggggggtggagggaatgcaggtagctctctggatggaacggggacaggggaaagagtactgccatgaaagagataggagacacataagaggacagcagaagccctggccctggggaggcttctcggaaggcctggcttcacaggcaggccacagaaggatatcgcgggcacgtgcacccaaagcaagatagtggcttcccttttatatccaatctaatcctgattggatgtccctgaggcccctgctggaaacagccataggagagggcccatggcagtaggggaaagaaggaagaaattccctgcaacaaaacttcagctaaactttgatttgtgtattgtttacataataattttaaagggtacataatgtgtaaagagtttggatagaacctctcttcatactatggttttcgtaaaggatctgttgttgttacggattcattttttccctctatttttataagagcagcagagttgtcttctcaaaacggctgccaagctctgcttcttgggaagatggatgcagtcatgtaggcctgagctgtccgtctttcaccgttaggtgggaggagcgtatgggtggacttgaaggacatggacgtggctggaatgagcacagcattgggtgagcgcacaaggatgaggacatcatgtgatcagttatgggtttgctcgcagggcacccagagattctcaaagaatcctgcagcctctttctgtgctggatttgcttgtcacggagaggcctccctccctttccaccccacccatggggcattatcctgtcactcccagccttgctccacacacacacaggtgggtacaagttccactggaggagaaaaggcaaggatggactttttccccttgtgagaggtttgatacccagaaaatgagctcaaaacctttacattagggttgcttgtaggaactggagcctggaggctgcatctacttcacctgtcactgctgagggagaggaggggagaaaggcccagcaacagcgtacagaggggtcagtcagcaagtccagagagcacatgcagggagatgtttggcccacaccgcacagccccgccatctccagtgggcgatgaaagatgtaggaaaggttgatttcaagatggaaatgacagcgctatccgcacagtatgaattagggatttgctgtgttagttgatttatccatccacacagaggggaggaaaaagacactcgttacttggtgggagattgagaaactgtggtacctaccacaaagtaatagctctgtttatgaagggcaagaaaggctacatttcagaatttgacacagtggagggtattagaggaaatcaaagaggagttgtgtggaaaatcaggttgtgtaaatgaaggtatgaatgctcagccagaggcaagatcagggagatggtacaaggcctgtttgttacatggatgagtcgggtgcctggttgtgtgtgtgtgtgtgtgtgtgtgtgtgtgtgtgtgaagtcagagttgaaattcagaagatcagactatggaaatcactgcccttttttttttaaaagctaatgaactacatacagacctaaaaggccttaatgaaatccgaacaattttcttttactttcaagatcaaaaacatgcacccaacccagccttggatgccaccaccaggtttttgaagcccttttgagtctaagaaggtgagaacaatgtaaccatagaaagcctttcgtgagcagagaaggcttgaatccacaatttcattcgctgaattaaaaaaaaaaggttcagacctctccttgggtgactaagttctaaagatgcaaatccatgtgcagaaagagatggcattttttagttgattatttttaaccaagtgccattaacattcatcccccacatcccttttctaaacaagcttagtgttacttggggaatgtgttgggatggacgatcacatgtaaggcaggaagaataggtcaaaggttgaaggccaaaggtaagaccagagggtttgcgaatgtgggtttgtaggatactgagaaagtgaataaagaggagaaaaaaccatggtattacacatcttgctgagaaaggaaagcattcggatctgctgcaaaaacacatatatccataaagactcatgttattcagaaaacagattgtgaacacaatcacattcgcatgaatcctttaaaaggaagaagaccttaaagtatctgcaaatctgaatttctatttattccttcactgaatatagaaacaatggttatctgattattagagatattattttggatatgttacttattaacttgctatggctggtaaccatgataaagtctgttattaataacaacataattctttttttaaagaagaaaagcttatttttcattgacagtgtatagatttatctacttagttgtgttttgctattagtgttttaattttttttttaagttgagtgtttgataaattttaagaccctgtccccaccttgttttgagtcctgtgttgactacaggtatatagctcaatttaaaaatcctaaagcaaaagaattttatttataaaagaatcaaacagttgcatgcatgaggctgtgaagtcagatatttagtaataaaagcagcagtgcctttttttgtatttacccattgacccccaccaaatgcaactgttttatattaagaaaatagtaacaattttaaaatctcagagtaaaatctatttcactacatgcttttccccccttgttctgatttaagcagtgtgtacttggcatctctacattgtcctagggacagtggtgttctacaatattatcatgtatgatgttttattggtgctttttattcatagtggcttcttaccagaaacagtaggaagaaacacatgaactgtgtacaagacatgaaacattgctgctgatatgttgttttttcacatgcttttgagttttcactttttaaacgagagccagcaagcaaaatagatgtggctgggtctgcctgtccgggcggctctttgcaccgagctctcaaatcctgtgtattgagggttcctttttggtactcaggattggagctacagctgggcccccctctctcccattcgtttgaagagacactgagggaaacaagggtttcttttgaggtgtccttggctgccttttacgggatgggagccttctccggatcttttgttcttctgcacctcttgtagctactgccggtgcaaggttgtagatgttattccccaggagcctgggcttgggggctgagctgggctgaatgcaaaagcatgcaaccagaaggcgggcaaggggaggaaaagcaggcctggcctcattggtcccctggagatgtctgtagcagtcagctccagcttgggcctggggaagcagcctgaccaaggcgctcaggtgtgcctgttacaagaagaacctgcagaaggataatttgcacatggagctgtgataacactaatgttgattttttttttttttacaagtcatcagagatgtttgcaaagtgagttttatttttttgtaattcctttatctttacttaaaggtgaatgtgtattcctctgggaggaataggaagaaaacaggaatgttaataatgtcgaacagaaaacttcctcccttattaatatataatcctcatgtatttatgcctaatgtaagctgacttttaaaaagctttcttttgttgcatgccctgtgcaggcatctgtattgtacatgcatgcctttcgtcctgttttcctgtataaagttagtgaacaaagaaatatttttgcctagttcatgttgccaagcaatgcatattttttaaatttgtcatatatggaaagagcatgtttgttacatgtaaaagctttactgatatacagatatactaatgtttgaagatgctgttctttgcaagtgtacagttttcaaatgttgttaccagtgaaacacccttgtggtttaaacttgctacaatgtatttattattcatttcctcccatgtaactaagaatcatggctatatttcatatcaacgttatattgaaagtgaagggaaatgattaatacaaggttttgtaacactgaaaaaa

SEQ ID NO: 443 - DNA, 11570 bp, Homo sapiens
gagcgctccaagatggcgcccaccgcagtcccgcccgccgcatcctcggcgcctttgcagtccggccgcgcctcccgggccccgcgttagggccgccgctgcctccctcgccgccgccgctgccagctgacctgtcctggacgcagcataactaacgaagctgctgcaggatgagaagatggcagcgcggctgcttgcaccaccaggccctgatagtttcaagcctttcacccctgagtcactggcaaacattgagaggcgcattgctgagagcaagctcaagaaaccaccaaaggccgatggcagtcatcgggaggacgatgaggacagcaagcccaagccaaacagcgacctggaagcagggaagagtttgcctttcatctacggggacatcccccaaggcctggttgcagttcccctggaggactttgacccatactatttgacgcagaaaacctttgtagtattaaacagagggaaaactctcttcagatttagtgccacgcctgccttgtacattttaagtccttttaacctgataagaagaatagctattaaaattttgatacattcagtatttagcatgatcattatgtgcactattttgaccaactgtgtattcatgacttttagtaaccctcctgactggtcgaagaatgtggagtacacgttcacagggatttatacatttgaatcactagtgaaaatcattgcaagaggtttctgcatagatggctttacctttttacgggacccatggaactggttagatttcagtgtcatcatgatggcgtatataacagagtttgtaaacctaggcaatgtttcagctctacgcactttcagggtactgagggctttgaaaactatttcggtaatcccaggcctgaagacaattgtgggtgccctgattcagtctgtgaagaaactgtcagatgtgatgatcctgacagtgttctgcctgagtgtttttgccttgatcggactgcagctgttcatggggaaccttcgaaacaagtgtgttgtgtggcccataaacttcaacgagagctatcttgaaaatggcaccaaaggctttgattgggaagagtatatcaacaataaaacaaatttctacacagttcctggcatgctggaacctttactctgtgggaacagttctgatgctgggcaatgcccagagggataccagtgtatgaaagcaggaaggaaccccaactatggttacacaagttttgacacttttagctgggccttcttggcattatttcgccttatgacccaggactattgggaaaacttgtatcaattgactttacgagcagccgggaaaacatacatgatcttcttcgtcttggtcatctttgtgggttctttctatctggtgaacttgatcttggctgtggtggccatggcttatgaagaacagaatcaggcaacactggaggaggcagaacaaaaagaggctgaatttaaagcaatgttggagcaacttaagaagcaacaggaagaggcacaggctgctgcgatggccacttcagcaggaactgtctcagaagatgccatagaggaagaaggtgaagaaggagggggctcccctcggagctcttctgaaatctctaaactcagctcaaagagtgcaaaggaaagacgtaacaggagaaagaagaggaagcaaaaggaactctctgaaggagaggagaaaggggatcccgagaaggtgtttaagtcagagtcagaagatggcatgagaaggaaggcctttcggctgccagacaacagaatagggaggaaattttccatcatgaatcagtcactgctcagcatcccaggctcgcccttcctctcccgccacaacagcaagagcagcatcttcagtttcaggggacctgggcggttccgagacccgggctccgagaatgagttcgcggatgacgagcacagcacggtggaggagagcgagggccgccgggactccctcttcatccccatccgggcccgcgagcgccggagcagctacagcggctacagcggctacagccagggcagccgctcctcgcgcatcttccccagcctgcggcgcagcgtgaagcgcaacagcacggtggactgcaacggcgtggtgtccctcatcggcggccccggctcccacatcggcgggcgtctcctgccagaggctacaactgaggtggaaattaagaagaaaggccctggatctcttttagtttccatggaccaattagcctcctacgggcggaaggacagaatcaacagtataatgagtgttgttacaaatacactagtagaagaactggaagagtctcagagaaagtgcccgccatgctggtataaatttgccaacactttcctcatctgggagtgccacccctactggataaaactgaaagagattgtgaacttgatagttatggacccttttgtggatttagccatcaccatctgcatcgtcctgaatacactgtttatggcaatggagcaccatcctatgacaccacaatttgaacatgtcttggctgtaggaaatctggttttcactggaattttcacagcggaaatgttcctgaagctcatagccatggatccctactattatttccaagaaggttggaacatttttgacggatttattgtctccctcagtttaatggaactgagtctagcagacgtggaggggctttcagtgctgcgatctttccgattgctccgagtcttcaaattggccaaatcctggcccaccctgaacatgctaatcaagattattggaaattcagtgggtgccctgggcaacctgacactggtgctggccattattgtcttcatctttgccgtggtggggatgcaactctttggaaaaagctacaaagagtgtgtctgcaagatcaaccaggactgtgaactccctcgctggcatatgcatgactttttccattccttcctcattgtctttcgagtgttgtgcggggagtggattgagaccatgtgggactgcatggaagtggcaggccaggccatgtgcctcattgtctttatgatggtcatggtgattggcaacttggtggtgctgaacctgtttctggccttgctcctgagctccttcagtgcagacaacctggctgccacagatgacgatggggaaatgaacaacctccagatctcagtgatccgtatcaagaagggtgtggcctggaccaaactaaaggtgcacgccttcatgcaggcccactttaagcagcgtgaggctgatgaggtgaagcctctggatgagttgtatgaaaagaaggccaactgtatcgccaatcacaccggtgcagacatccaccggaatggtgacttccagaagaatggcaatggcacaaccagcggcattggcagcagcgtggagaagtacatcattgatgaggaccacatgtccttcatcaacaaccccaacttgactgtacgggtacccattgctgtgggcgagtctgactttgagaacctcaacacagaggatgttagcagcgagtcggatcctgaaggcagcaaagataaactagatgacaccagctcctctgaaggaagcaccattgatatcaaaccagaagtagaagaggtccctgtggaacagcctgaggaatacttggatccagatgcctgcttcacagaaggttgtgtccagcggttcaagtgctgccaggtcaacatcgaggaagggctaggcaagtcttggtggatcctgcggaaaacctgcttcctcatcgtggagcacaactggtttgagaccttcatcatcttcatgattctgctgagcagtggcgccctggccttcgaggacatctacattgagcagagaaagaccatccgcaccatcctggaatatgctgacaaagtcttcacctatatcttcatcctggagatgttgctcaagtggacagcctatggcttcgtcaagttcttcaccaatgcctggtgttggctggacttcctcattgtggctgtctctttagtcagccttatagctaatgccctgggctactcggaactaggtgccataaagtcccttaggaccctaagagctttgagacccttaagagccttatcacgatttgaagggatgagggtggtggtgaatgccttggtgggcgccatcccctccatcatgaatgtgctgctggtgtgtctcatcttctggctgattttcagcatcatgggagttaacttgtttgcgggaaagtaccactactgctttaatgagacttctgaaatccgatttgaaattgaagatgtcaacaataaaactgaatgtgaaaagcttatggaggggaacaatacagagatcagatggaagaacgtgaagatcaactttgacaatgttggggcaggatacctggcccttcttcaagtagcaaccttcaaaggctggatggacatcatgtatgcagctgtagattcccggaagcctgatgagcagcctaagtatgaggacaatatctacatgtacatctattttgtcatcttcatcatcttcggctccttcttcaccctgaacctgttcattggtgtcatcattgataacttcaatcaacaaaagaaaaagttcggaggtcaggacatcttcatgaccgaagaacagaagaagtactacaatgccatgaaaaagctgggctcaaagaagccacagaaacctattccccgccccttgaacaaaatccaaggaatcgtctttgattttgtcactcagcaagcctttgacattgttatcatgatgctcatctgccttaacatggtgacaatgatggtggagacagacactcaaagcaagcagatggagaacatcctctactggattaacctggtgtttgttatcttcttcacctgtgagtgtgtgctcaaaatgtttgcgttgaggcactactacttcaccattggctggaacatcttcgacttcgtggtagtcatcctctccattgtgggaatgttcctggcagatataattgagaaatactttgtttccccaaccctattccgagtcatccgattggcccgtattgggcgcatcttgcgtctgatcaaaggcgccaaagggattcgtaccctgctctttgccttaatgatgtccttgcctgccctgttcaacatcggccttctgctcttcctggtcatgttcatcttctccatttttgggatgtccaattttgcatatgtgaagcacgaggctggtatcgatgacatgttcaactttgagacatttggcaacagcatgatctgcctgtttcaaatcacaacctcagctggttgggatggcctgctgctgcccatcctaaaccgcccccctgactgcagcctagataaggaacacccagggagtggctttaagggagattgtgggaacccctcagtgggcatcttcttctttgtaagctacatcatcatctctttcctaattgtcgtgaacatgtacattgccatcatcctggagaacttcagtgtagccacagaggaaagtgcagaccctctgagtgaggatgactttgagaccttctatgagatctgggagaagttcgaccccgatgccacccagttcattgagtactgtaagctggcagactttgcagatgccttggagcatcctctccgagtgcccaagcccaataccattgagctcatcgctatggatctgccaatggtgagcggggatcgcatccactgcttggacatcctttttgccttcaccaagcgggtcctgggagatagcggggagttggacatcctgcggcagcagatggaagagcggttcgtggcatccaatccttccaaagtgtcttacgagccaatcacaaccacactgcgtcgcaagcaggaggaggtatctgcagtggtcctgcagcgtgcctaccggggacatttggcaaggcggggcttcatctgcaaaaagacaacttctaataagctggagaatggaggcacacaccgggagaaaaaagagagcaccccatctacagcctccctcccgtcctatgacagtgtaactaaacctgaaaaggagaaacagcagcgggcagaggaaggaagaagggaaagagccaaaagacaaaaagaggtcagagaatccaagtgttagaggagaacaaaaattcagtattatacagatctaaaactcgcaagtgaaagattgtttacaaacttcctgaatattatcaatgcagaacagctgtggagactctaacctgaagatctataccaaacgtcgtctgcttaccacgtaacacagctgcatcttgagcagtgacctgccaagggcaaaggaccccgctccctagacttacagattttctaatgcttgggcaggtggttactgcatgttccacatcagtcaatgcaacttaggacaaaactaaccagatacagaaacagaagagaggctgccgggaccagcatatttccgttgcagccaaatggattttattttttcattttattgattctcagaagcagaaagcatcactttaaaagttcgtttgttcatgcaaactatatttgcattcttacattagttaagctaagcagcaaaaagaaaacacacacacacactcacatttagcccatgtcatttaattgtcagtttctttgacataaagcgcatcttctccacatgggcttcacgtggtttggagatgggtgggggaaaacaatcaggtttcttcaggctgaggaggacttgctcaggccgattccaaacattgtgctcgttcaatgcgtagaaatgatttgcatgatggcatgccgtgatcagaagtcatgcatgagatccatacaccacaggacactactaatctagtcccttgcactgggtcagcctttggacaggacccagccctgcaccgttcactgtatttggagaaaatggtaagagttccataccggctacaattctttgagttcttaaaagtccttcatacaccttctgggtagggaaacaaccaactaattgactaacaccaccaacaacaaaaaacaaacccaatccaacaagcagatggatccgttgcgtgtatatgtttaacagacatctctaacatacagccattgttgcacattttgcaagatgaactatttaatgctgctctgtgtccagtacatgggggagactttgatcccaaatggcttgtactatttatgtcactgtaaaaccaaatcctagggctaaaaaaaaaattcatttgtatcttgcaatatttatgacgatcgtttagccttcatactggagaattgacacttatttggggtagagataaaagtgcttttcaaagtagcaccagttatctctaggggtaatttggggaacttaaaatgacctttcattgggagttatggggtgctcatttcatttcgtatcatgtcctctgcattgtggctttctccaggcatgggtcgataccgcgaggggttcagatattctgaactgacctctctcttctgcagaggggtcatcgcatactcacacactgcatggctccccctgcctccatcacatttctccactgagcagggcttcccttgcccacagaggtgggtgagggtagcagcattggggttacggctgtggtttctttcacttattattagaataatagtcactggtgagacctgaggtagagatggagccgcctctgaaccaagcccacttggtttctttactgcactggttttcatgagaaagcaatttaatattaattctttaggatgttccagcttccctcagtgcattcccttgcagccagttttgctatctgcttagcgacctgcccattgtcattgaagtgtggcttctgggggagcgtcatatcttccattccatctcctgctttaggaaagacagtttttagtccaggggtttctcacctaatgactggatttcaaagccaagatgctgcagttgaatgtgtcaggaagtctctatacaaagagtgaaaagagactttagcatgtgaaccaaatccaaataaattcttcctgaaccatacactagagggggaagaagaaccaacccataatcagacacaccgatctgccttgcagtagaagcactttgaaggtaatttcacagtccaccagactagttttgcatagaacaaaccacagtaagtcggcaagcagagctttctatcttgttggaccactagaaactgtccagctctcttaagcctgcttctgcagcagcatccgtagaatttttgtactacacccaataccagactgggaaggcctatctttcagtgaccctgctaactgctaggatgaatgtatagtaacatgtacaggctacattgtaaacagcacaaaacagaagctgacatgtgtggttattctttttaagagaattataaatactgtaatatataattttattttattggcatgcctttttgtaaatacaaattattaacttattaaataggaaatggcttctggcttatgccattgtcatgtttatttttattttttatacttttctttcttcttagaacttagatgctgtcagccaatgtacatccccaaaccagacagacagacaaaaaattttttattgctaatggtcttttccaaaacaacaaaaaatatatatttttgttccaatgtgcaataaattctaaccacgtctatgcaagatttggctaaacttaataattgttcttaggtcttgagatgggcaacagagctgtaagatcccgccaagtacaccatgtgctcatgctagtgatgtcattaagctactagggcatagtgatgagatttttctgagatctaaccgtttccctccgctagctcctgaccccagcccagcaggctgtctcctcagtaacacatgggccttggtatctggcacccatcagccagcctcataggaaagaagccacctccgctgtatttgaagtttcactttttaaaaaaaaaatgtttcccacctttttatccttcacccactgtccttccacctgctcactcactcactctctcacccatcctgctccacacttctttggtagtaaatgacaccatcaccagcagtttacacccgcagttaacaggcatcgaactgaaagaatcagtgatgacgtttttgtgcatcttcgctgagtgggtaagtggcaatgctttgccaaatattaacgaagccaatcaaagagcagcgcagccacagtatcactgcacatatatatatagatatataaatataatataaatatttattttttgtagccaggtccttggtgcagtatttatactccacaatccaccttttaaaaaaaggacaaaaagcaaaaagatgtgtgatgctgttaataatttaaaatgcagagccaaagccactgagcagcagctgacatggttgctggtttgtgtgtgaaaaacattttccccctcttctttccttaacctccttgttgcttaggatgaggagactctgtaatttaaagcagaggacgagaggaggaagaaacttccatgttaacatggcctactctcactcctttctaaacgagccacttttggcgtcagaagttgactggagagagataaacaaactcccagtcaaagcccctaaagcgacagtgcccagagttcttttattttttgctgcaaccaacgtaaacctgtaaaagaccaacagtgaagattagtgtattagtgaatgcatggaggccaatgctgccctaatgagacgtgataaaaagtccatcactcctctaagccaaaaggaaacaaaataaaaatgaccctttttactgtacaagggaagcctgtcttggtgtgtttgttgcttgactatcccaattcttgagtcctgggaggggtctgggaattgggaccttagcacatttggggaaaggaggggaatagagggaagagaaatcaaaggggctctcgcaaagttctggctaagaaggagagattggaagaaaagcaaggtcctgaccccccccagatccccactcacccattgcatgtggcattccccactactggccggtgcttagaggcccataaaacctctcttcacctaatccacctggcagagccctcagagatgacgtcagccaacccagctggactggccttacttctgcctttttcacctgtatgttaaaaaacaaaaacaaaaaaaccctatccctgtgccccaaagctagggcatgtgcgatgcccaacagcctccactctgcaagctcatactgggccctgccctccatcgccccagacaggcccacagacgagggctggtctccttcacatttgtgtgggggtgggggcacgcttcctcttccttctctccctgtccccctttggggacatccctctctaggcctaggccatgtctcctggttcaggaacactctctcaggaggatctcgaagtgcccactctagtccgctccagtagctccactctggagcgagatggctggtaggtcagtccccatcctcctcccctcggcccccagcctccaggcctgctgtggaggtgagatcgccatgggtcatgactttgtgacttgagtcctgggcatcttctgtaatgatgcctctttcttttctcagatgttgcccacagtttagcaaaaagcttcgttcattttcaggtactccccaccccctaaagaattggctgcaacttgccagccagggggacatcaggagagaagaggaagtctgggttgggaggggcccaagttttgcaacagagtttccattgttcagctctgtgctttcttggattccctttccaagattaccaagatttcctccattaaaactcctgaggcaccccctgcccctgccccccactgctgtttgctgtacatagaggctaagtggggtggggtgggtgggtgtgcacatgtggtgtgtgtgtgtgtgtgtgaagaatgtatataggtaaaggggagtgtggtccagtggttccagaaaagggacagaactgtgttctgtccctagcttgaccgctggctcgctgtgtggccttgggcaagtcacttaacctctctgtgcctcagtttccccatctgtaaaatggggataataatactgacctacctcacaggggtgttgtgaggctttaactaaatgttttgtaaagcgttttgagatacagaggcaaaggcgctagggaagggcaaagtattattggacttaaggaagctgaaatggtaccataaatgctgctattctgagagccattttaaactgcactgctccaaccacccccgcttctcatcaccaggacagcaggtcgagaaaatgtctttcctttcacttgcttctggggtttgtgattattcaagacaattttttccccttgctgtatctccttccctcacctcctcgacttgttccctgttctgtttatgcggaaatggcagaaatgcttgagaaatgagaatgtgtaagtggattggaagtttatagtatgaaatttcaattttactttgtactgtacatctttttactttagaatttgcaataaagggttacgtcaatcttgttttcaactctcaaaaaaaaaaaaaa

SEQ ID NO: 444 - DNA, 2615 bp, Homo sapiens
actcgccgcagcctgcgcgccttctccagtccgcggtgccatggcccccgcccgtctgttcgcgctgctgctgttcttcgtaggcggagtcgccgagtcgatccgagagactgaggtcatcgacccccaggacctcctagaaggccgatacttctccggagccctaccagacgatgaggatgtagtggggcccgggcaggaatctgatgactttgagctgtctggctctggagatctggatgacttggaagactccatgatcggccctgaagttgtccatcccttggtgcctctagataaccatatccctgagagggcagggtctgggagccaagtccccaccgaacccaagaaactagaggagaatgaggttatccccaagagaatctcacccgttgaagagagtgaggatgtgtccaacaaggtgtcaatgtccagcactgtgcagggcagcaacatctttgagagaacggaggtcctggcagctctgattgtgggtggcatcgtgggcatcctctttgccgtcttcctgatcctactgctcatgtaccgtatgaagaagaaggatgaaggcagctatgacctgggcaagaaacccatctacaagaaagcccccaccaatgagttctacgcgtgaagcttgcttgtgggcactggcttggactttagcggggagggaagccaggggattttgaagggtggacattagggtagggtgaggtcaacctaatactgacttgtcagtatctccagctctgattacctttgaagtgttcagaagagacattgtcttctactgttctgccaggttcttcttgagctttgggcctcagttgccctggcagaaaaatggattcaacttggcctttctgaaggcaagactgggattggatcacttcttaaacttccagttaagaatctaggtccgccctcaagcccatactgaccatgcctcatccagagctcctctgaagccagggggctaacggatgttgtgtggagtcctggctggaggtcctcccccagtggccttcctcccttcctttcacagccggtctctctgccaggaaatgggggaaggaactagaaccacctgcaccttgagatgtttctgtaaatgggtacttgtgatcacactacgggaatctctgtggtatatacctggggccattctaggctctttcaagtgacttttggaaatcaaccttttttatttgggggggaggatggggaaaagagctgagagtttatgctgaaatggatttatagaatatttgtaaatctatttttagtgtttgttcgtttttttaactgttcattcctttgtgcagagtgtatatctctgcctgggcaagagtgtggaggtgccgaggtgtcttcattctctcgcacatttccacagcacctgctaagtttgtatttaatggtttttgtttttgtttttgtttgtttcttgaaaatgagagaagagccggagagatgatttttattaattttttttttttttttttttttttactatttatagctttagatagggcctcccttcccctcttctttctttgttctctttcattaaaccccttccccagttttttttttatactttaaaccccgctcctcatggccttggccctttctgaagctgcttcctcttataaaatagcttttgccgaaacatagtttttttttagcagatcccaaaatataatgaaggggatggtgggatatttgtgtctgtgttcttataatatattattattcttccttggttctagaaaaatagataaatatatttttttcaggaaatagtgtggtgtttccagtttgatgttgctgggtggttgagtgagtgaattttcatgtggctgggtgggtttttgcctttttctcttgccctgttcctggtgccttctgatggggctggaatagttgaggtggatggttctaccctttctgccttctgtttgggacccagctggtgttctttggtttgctttcttcaggctctagggctgtgctatccaatacagtaaccacatgcggctgtttaaagttaagccaattaaaatcacataagattaaaaattccttcctcagttgcactaaccacgtttctagaggcgtcactgtatgtagttcatggctactgtactgacagcgagagcatgtccatctgttggacagcactattctagagaactaaactggcttaacgagtcacagcctcagctgtgctgggacgacccttgtctccctgggtaggggggggggaatgggggagggctgatgaggccccagctggggcctgttgtctgggaccctccctctcctgagaggggaggcctggtggcttagcctgggcaggtcgtgtctcctcctgaccccagtggctgcggtgaggggaaccaccctcccttgctgcaccagtggccattagctcccgtcaccactgcaacccagggtcccagctggctgggtcctcttctgcccccagtgcccttccccttgggctgtgttggagtgagcacctcctctgtaggcacctctcacactgttgtctgttactgattttttttgataaaaagataataaaacctggtactttctaaaaa

SEQ ID NO: 445 - DNA, 6400 bp, Homo sapiens
acttccggccagggcctccctccttctctctaggtttggctgccgccttctagccgggcgttcgcggccccgccggcccgactctcaagcctcagctcccaggctaggctgtggccgccggtggcctggggagagtgcggcgccatgcctcgggcttaatgcgcccccccctcttctcccagtcttcagtcttaagtcgttagcctcctccctccgctttcagcagtggtctttcagctctcttcttgtgcgctgttgtcgaccccgaccagccccttccaacccagtcatcatgtcccagccgggaataccggcctccggcggcgccccagccagcctccaggcccagaacggagccgccttggcctcggggtctccctacaccaacggtcctgtccaaaatgcattgctgtcttcacaagagtcagtgagccaaggatacaatttccagcttccaggatcctaccctcatccaataccagcaaagactttgaatccagtctctggacagtctaactatggtggttctcagggatctgggcagactcttaatagaccacctgtggcctctaatccagtgacaccttcgcttcatagtggtcctgctccccgaatgccattacctgcttctcagaacccagctactacaccaatgccttctagtagctttcttcctgaagccaacctgccaccacctttgaattggcaatataactatccatccacagcctcacaaacaaaccattgtcctcgtgcatcatcccaaccaactgtatctggaaatacaagtttaaccacaaatcatcaatatgtttcttctggatatccttcacttcaaaatagcttcataaagtcaggtccttctgtacctcccttagtgaatccacctctgcctacaacttttcaaccaggagctcctcatgggccccctccagctggaggcccacccccagtgagggccctcacgcccctgacatcatcatatagagatgtaccccagcccttatttaattcagctgtcaaccaagaaggtattacatcaaataccaataacggatctatggtggtccacagtagttacgacgagattgaaggaggtggcttattggcaacaccacagcttactaacaagaatcccaaaatgagccgaagtgttggatattcatatccctccttaccacctggttatcagaacacaacaccacctggtgcaactggagtaccaccctcttccttgaattacccaagtgggccacaagcctttactcagactcccttaggtgctaatcatttaaccacaagcatgagtggattaagtctacaaccagagggtctaagagttgtcaatcttcttcaagaaagaaacatgcttccgtcaacacctttgaagcctccagttccaaatttgcatgaagacatccagaaactcaactgtaacccagagttatttcgatgcacgctgactagcattcctcagacgcaggccttattgaataaagccaaacttcctttggggctgctgcttcatcctttcaaagacttagtgcaattgcctgtggttacctccagtacaattgtgagatgccgttcatgcaggacgtacatcaatcctttcgtcagctttcttgatcaaaggagatggaagtgtaacttatgttatcgagtcaatgatgttcctgaagaattcttgtacaaccctttgaccagagtttatggagaacctcacagaagaccagaagttcaaaatgctactattgagtttatggctccttcagaatacatgttacgaccacctcagcctccagtgtatctctttgtatttgatgtgtctcacaatgcagtcgaaactggatacttgaattcagtttgccagagtttgttagacaatctggatttgcttcctggcaacactagaacaaaaattggcttcataacatttgacagtacaatccatttctacggtcttcaggaaagtctctctcaacctcagatgctaatagtttcagatattgaagatgtttttatacctatgccagagaacttattagtaaacttaaatgaaagtaaagagctcgtgcaagatttactgaaaactttgccacaaatgtttaccaagactctggagacccagagtgccttgggtcctgcactgcaggctgcctttaagctgatgtctccaactggtggtcgaatgtctgtctttcaaacacaactcccaactcttggagtgggagccctgaaaccacgagaggaaccaaaccacaggtcatctgctaaggatatacacatgacaccatccactgacttctataagaaattagccttggactgttctggtcagcaagttgctgttgacttattccttctcagtggacagtattctgatttggcttctctgggttgtatttctcggtattcagcaggtagtgtctattactatccctcttaccatcatcagcacaacccagtccaagtacagaaattacagaaggaactacagagataccttactcggaagattggctttgaggcagtcatgaggattcggtgcaccaaaggtctttccattcatactttccatggaaacttctttgttaggtcaaccgacttactgtctttgcctaacgtcaacccagacgctgggtatgcagtacagatgtcagtggaagagagtcttactgacactcagttggtttcttttcagtcagcactcttgtatacatccagcaaaggcgaaagaagaattcgtgttcatactttgtgtttgccagtagtttcgactctgaatgatgtctttcttggagctgatgttcaagcaatttcagggttattggccaatatggctgttgacagatctatgactgccagtctgagtgacgctcgggatgctctagtgaatgcagtcattgactccctttcagcttaccgttcttcagtcttaagtaaccagcagcctggactcatggttcctttttctttgcggcttttcccactttttgtgttggctctccttaaacagaaatcattccagactgggacaaatgcacgtctagatgaacgcatttttgctatgtgtcaagtgaaaaaccagcccttggtttaccttatgctcacaactcatcccagtttgtatagagttgacaatctctcagatgagggagcactcaacatcagtgatagaaccatacctcagccccccattcttcagctttcagtggagaagctgagcagagatggagctttcctcatggatgcaggctctgtactgatgctttgggttggaaaaaattgtacacagaattttctcagccaagttctaggagttcaaaactatgcatcaattccacagcctatgacagaccttccagaacttgatacaccagaatctgccagaataatagctttcatctcttggcttagagagcagagaccatttttcccaatactttatgtaataagggatgagagtccaatgaaagcaaacttccttcaaaacatgatagaagacagaacagaatctgcattatcatattatgaattcctgttgcatatacagcaacaagtgaataaatgaatgaatgaagaaatttgacttatttttaaggaatgtcacgatagtgcagaatacctggaaatgtgtaataccttctttttctattatgtttgtggactaatgtgatgattgagatgttctcactgtgatttcaacaacctatagcaaataaaagaccacagcagagaatcaaacatgcaactctgaaatactgtatttttcaaatcagaatatagctacgtatgattggatacttttttcttgccaattatgtttgagttgttatggattaaaataagaatattgcagaggcaaagtacattttgtaaaataaagatttctgtgttctacatgtatatttctcatttttaatttttctgaatctttggctgctacatttaaaacctcacaaacctaagtgttgcagggaagttacaaattgattggtagtgatgtttttaaaataaaaacaatggaaagtaaatataatgtaggaaaactagaattcattccccacacgtgtcttttttttttctttgttaagggaaaggatcatgttgactaaaactaaactaattctagtatagcttgagaaaaatatgaagaaacacattcaagctttaaaatctgtcagtattctttatgcttgaagaacaaagtcactttgatttgaagtgagaactatcattaggtggttttctgatttcctgatgaagagttggacatactgtcttaatctatagtgaaaagaatttgagctgtcttcataaacactgggactagcaatgataatagggagataagaaactttaattatcttgatcctttaagtggattttatttggtgcatttctgctctgggtatataataaaagtgggggtttttggtgaaatgagtgaagaaatgaaaggtttctaaagtgctatccaaatacatcagtaacatttttctaaggagtttaattgttaaattggaagtcattcataagaaatatttatgcttgaatatgaaaatctatgaaagcataaatgctgctgtttgatttggtggatattaagattatacacatccaacatattaaagttatgaaagaaacttgacttctgaaaatccttaagagactgctttcttgattcagctagagaaatattatagtcaaaactattgagtgaattttgtttacaaataggtaaattatacatttgtatatttaaagtgctgtgacatagtatctttaagagtttggctcagttttcacagattcattttgtcttaagaatttcttaaatatgttcatgtataatacttgatcaaaatatttttgggttttttgttttgttttaatgggttagaaaatgtttacaatcttggtcttatatgatcaccaatggaatagtaacttccaggtttatatcaatatgagctgactttaactgagttgtttgggatagggaagaagcagtccctctacagtatacaactactgcttgccagctggatcaaaataatcatgttttatgaaaatatctcccttaagcagtgttaaggttggtttgcagtgtgtaagtggcacattgaactggaagttttcttgaaagctgcttcatctattaagaagcaattttcaaattgtagcgaattatattatcccctcttttaaagaaacagtcgttatatgctgatgtttcttaaaataactaaaatgttcctcttaatgtgattttaaatggagttatttgtaggtcctttcttagtagtaaagaatcttctagagggaaacatttgtgcttttagggataatcttccttgtgcctcactacatccctaagtgggtatgactcttgttattaccacatgcttttttagtatatttcacaaatttacttttaaatattattttagatacggtgtaacatgtgcaattcagaataattttataacaggtcatgaaaaacataactttagttaggattcacaatatttgttctccacataatgagagaatgaatgagcctttggagatactgatataaggcaattattttttgcaatgttgaatgtgttttttagtttgattctttttttttcccccaatagggcactacctgccatatcatcttgtattactttttgatgtaaagcgactaatatttacactatgccatattttttttaattatagttgtaaattatgaaagatccttgaattttctacagatctacaactactaatgtaacagacaagggcaatcttggtatttaaatctgagcatggcagttctaccataaaaagtactctatttttctaatttctaggatttttaaaataacatttctgtaagtctgacatactaatagtcactcaagcagtaccatttattttagtttgcatatattttcactgtttttaatttaatgtattgagtctaatagactgttttgcaataattagaataaagatttatttcttctaatcaaagatgcataacagctattatctaggggaccaccaaatgtgatttcaaaattttgttaactattacaaatgtaatccttatatagaaattttaattttgtaaagtagtgtataatattgtaatattaaattcttgttcttaaattcaaatatgtattgatcttcaatgtgctgtgttaaatcttgcttctctgaaaagttggagacaagatttgtcttcctttttacagtttgtaattttcactgttttattcctgttaaaaaaaaaaaaaagtcatttgtaacccatgcagaccattgtttgatctatgctaacttatcaacttggctattcaataaagttaattgaaaagagcttataaaaaaaaaa

SEQ ID NO: 446 - DNA, 4709 bp, Homo sapiens
ggcgcgttccttcctcttcctctctcctctccggccccgccttcccttccctccgcccacctccctgaagcggagccgccgtcgccaccagcgccgtcatgtcggcccccgccgggtcctctcacccggccgccagcgcccggatcccgcccaagttcggcggagcggccgtctcaggagccgcagcgcccgcgggcccgggtgcgggcccggcgccgcaccagcagaacggtccagcccagaatcaaatgcaggttccatctggatatggattgcatcatcaaaactatattgctccctcaggacattactctcaaggacctgggaaaatgacctcattgccattggatacccagtgtggtgattactactctgctctctatacagtaccaacacaaaatgtgactcctaacacagtgaaccagcaaccaggagcacagcagttgtacagcaggggtcctcctgcccctcatattgtgggatccactctaggatctttccaaggtgctgcatcgtcagcatcccatttgcatacgagtgcctcccaaccatactcctcttttgtgaatcactacaatagtccagccatgtactctgccagctcttctgttgcgtctcagggatttccctctacttgtggtcattatgctatgtcaactgtttctaatgccgcgtatcctagtgtttcatatccctctctgcctgctggtgatacatatgggcaaatgtttacctcacagaatgctccgactgttaggccagttaaagataattcattctctggtcaaaatacagctatcagccatccatcgccacttccacctctaccatcacaacagcaccaccagcagcaaagtctttcaggatacagtactctaacgtggtcatctccaggccttccatcgactcaagacaatctcatccgaaaccacacaggatccctggctgtagcgaacaacaacccaaccattactgttgcagattctttatcctgtcctgttatgcaaaatgttcagcctcccaagtccagcccagtggtatccactgttttatcaggatcctcaggatcctcatcaacaagaacacctcccactgcaaatcacccagttgagcctgtgacctcagttacacagccatcagagctattacaacaaaaaggcgtgcagtatggtgaatatgttaataaccaagctagctccgcaccaactcccttgtcatcaacttccgatgatgaggaagaggaggaggaggatgaggaagcaggtgttgacagctcttctaccacaagcagtgcttctccaatgcccaacagttatgatgccctggaaggaggcagttacccagatatgctttcttcatcagcaagcagtcctgctcctgatcccgcccctgaacctgatcctgcttctgctccagctccagcttcagctccagctcctgtcgtccctcagccttcaaaaatggctaagccttttggctatggctatccaacacttcagcctggttatcagaatgctacagcaccacttatttctggagtacagcccagtaacccggtatattctggattccagcagtatcctcaacagtatcctggtgtgaaccagctatcctccagtataggaggattgagtcttcagagttctccacaaccagaaagcctgagacctgtaaaccttactcaggagaggaatattttacctatgactcctgtttgggctcctgtacctaacttgaatgcagacctcaaaaaattaaactgtagcccagattcatttcggtgtactttgacaaatattccacagacacaggctttactgaataaagctaagcttcctttaggattgttgttacatcccttcagagacctaacgcaattaccagtgataacatcaaataccattgtgaggtgccgatcctgtcgaacgtatattaacccctttgtatccttcattgatcaacgtagatggaaatgcaatttgtgctatagagtaaacgatgttcctgaagaatttatgtataacccccttacccgatcttatggagagcctcataaacgaccagaagttcagaattcaactgtggagttcattgcttcttcagattacatgctgcgtcctcctcaacctgcagtttacttgtttgttttagatgtgtctcataatgcagtggaagctggatatttgacaattttgtgccagtcactcctagaaaatctagacaagcttcctggagattcacgaacaagaataggattcatgacctttgatagcactattcatttctacaatttacaagaaggattatcacagcctcaaatgttgattgtgtctgatatagatgatgtttttctacctacaccggatagtttacttgtgaatctatatgaaagtaaagagcttataaaagacttactgaatgcattaccaaacatgttcaccaatacaagagaaacacacagtgcccttggtcctgcacttcaggctgcctttaaattaatgtctccaacaggtggccgtgtgtctgtatttcagacacagttaccttccttgggtgcaggacttctgcaatccagagaagatcctaatcagagatcaagtacaaaggtggtacaacatcttggccctgcaactgatttttataagaaacttgcattagattgctcgggacagcaaactgcagtggatttgttccttttaagttcacagtattctgatcttgcttctctagcttgcatgtccaagtattctgcagggtgcatctattattatccatcattccactatactcacaatccttcacaagcagaaaagttacaaaaagacctaaaacggtatctcacaagaaaaattgggtttgaagctgttatgagaataaggtgtactaaaggtctttcaatgcacacttttcacggtaacttctttgtccgttctactgatttgttatcccttgccaacatcaatcctgatgctggatttgcggtgcagttgtcaattgaagaaagtttaacagatacttccttagtatgttttcaaacagccctattatatacatcaagcaaaggtgagcggagaattagagtacatacactttgtttgccagtggtaagttcactagcagatgtatatgcgggagtggatgtacaagctgccatctgccttctggcaaacatggctgtggatcggtccgtttcatcaagtctgtcagatgcaagagatgccttagtgaatgctgtagtggactcattgtctgcatatggctcaactgtctcaaatttacagcactctgcattgatggcgcccagctccctcaagttgtttcctctctatgttttggcccttctcaaacagaaagcatttagaacgggtacaagcacacggctggatgatcgtgtatatgccatgtgtcagataaagtctcagccacttgttcatctaatgaaaatgattcatcccaacttatacaggatagacagattgacagatgagggtgcagtacatgttaatgacaggattgtaccacagccacctcttcaaaaattgtctgcagagaagctgacaagagaaggtgctttccttatggactgtggctctgttttttacatttgggttgggaaaggctgtgacaataacttcatagaggatgtgcttggatatactaattttgcatcaataccacagaaaatgacacatcttccagagctagatacactttcatcagaaagagccagatccttcataacttggcttagagacagcagaccattaagtccaatccttcacatagtaaaagatgagagtcctgccaaagcagaattttttcagcatttgattgaagaccggacagaggctgcattttcttactatgaatttttgcttcatgttcagcagcagatttgtaagtgaagtagaataaaattgaataagaaaaagatctataacctaggtaaagcataatctgtcagagaagcgcgtgagaaatttgaaatgaaggcatttgttaatacaagatgcaacgcacagcactctgtctgaggctttggtaaaaagtaaaggggaagaaagaacttgacagatctttttcaactcaaattaatggtaacgatgatgctgtttcaccaagtatattttgaattggtttctacacatttccagtagtatggcagtacagtgctctgttcattgcaagctggcaaatttatgtagctatgtggaatgatatgtcataatgtaaaattagataaattcttttttcttataattaatataacatttctggacttgaactctggcaagagatgccaaaaggcattggtaccgtgttatttgtttatatgaattactttttaacaaggaatgtttcttattcattaaatgaattcaacattttctctgtaaaaacaatagagtttcagtacatgaactatagaaaaaaatctatatataatgtacataaatgttacatttgtaaagaaaatgtaaaaatgtaactatagcatatgaattgcttaaactgtgctgcattgttggatgacaactctttttgtcacagttagagaatgaggttgactaatgcatattatgaattgagtccacaaaggaacacaaaactctttgtaattctgttaaatcttttatgtagatttatttatgatcagcctactaattaaaactatttcgcttgacagtaaaaaaaaaaaaaaaaaaaaa

SEQ ID NO: 447 - DNA, 1569 bp, Homo sapiens
ttttttcttcttcaccttacggcagagcagggaactcagctttagattctccctgtactggaaagggatgtcgcaaggttggggacgaaacctctgagtttgcgaccgtagctgtcgctttccggccaacacagaggtgcctgaaggctggttggggtggtgaggcccgaggcagctcttgttcagcttctggaatttctgagcagccctcgtcagtacaagatggaccccgtagtcttgagttacatggacagtctactgcggcaatcagatgtctcactattggatccgccaagctggctcaatgaccatattattgggtttgcgtttgagtactttgccaacagtcagtttcatgactgctctgatcacgtcagtttcatcagccctgaagtcacccagttcatcaagtgcactagcaacccagcagagattgccatgttccttgaaccactggacctccccaacaagagagttgtatttttagccatcaatgataactccaaccaggcagctggaggaacccactggagtttattggtctacctccaagataaaaatagcttttttcattatgattcccatagcaggagcaactcagttcacgcaaagcaggtagcagagaaactggaggctttcttaggcagaaaaggagacaaactggcctttgtggaagagaaagcccctgcccaacaaaacagctatgactgtgggatgtacgtgatatgtaacactgaggccttgtgtcagaacttctttaggcaacagacagaatcactgctgcagctactcacccctgcatacatcacaaagaagaggggagaatggaaagatctcattaccacacttgctaaaaagtagctattgaagtatatttgcgacttttgaaggctcctctttctgcccttccccatttgttggatggctgcaatctcagtgcctgagggaagatgcctagtagaggaaagcttaatactctttttcctgaaagaatatcatcctctgcattatccccatggaacgtttcactttaaccctgactggggagcaatatgttctgtgaaaatatcttgaaattgtacaccaaaaccttacaaccaacttatttgaacatttattacacacagggtttacgtaagacttttcttattggtatataattaatttcctttggtctcccttatccacattggcttattctggaggaaaagcagtgatctgtaaaacaaatcaagaatatattaaatctagaggaatgcagagaagaaaactataaaacagaaccaaaaacttgttgcacagcctacataattaagagatcaactggctggaagcagatcaaggcctaacttcattcaagacctaaatattatgagactcagttattcggttttatgtgacatctcttccattcaccatgcacaggcttttccagctatctatataatgtttgcaaatatttgataaagatgatgttaccctatcttcctccatctgattcctggaatgcttgaagaaaggggaaatcttgagtaacctcattaaaattaatgtctggtggacctctca

SEQ ID NO: 448 - DNA, 2180 bp, Homo sapiens
gtaacaactctcagaggagcattgcccgtcagacagcaactcagagaataaccagagaacaaccagcatttcttgcactacaacttgcttaagctcttacacttcatagtgaagctatgcaccaccgagtgaagcgatgtggaacattggaaagagtgggcttccttagacagacctgggcttgaatccctgctccactacctaccagctgtgtgaccttatacaagttacttaatgtttctgagcatcaggatataatctataaaatagggagaatcacctctacctcatacagattctgcaaagattaaacgaggagaggagattgaaacaatggaggatctttgtgtggcaaacacactctttgccctcaatttattcaagcatctggcaaaagcaagccccacccagaacctcttcctctccccatggagcatctcgtccaccatggccatggtctacatgggctccaggggcagcaccgaagaccagatggccaaggtgcttcagtttaatgaagtgggagccaatgcagttacccccatgactccagagaactttaccagctgtgggttcatgcagcagatccagaagggtagttatcctgatgcgattttgcaggcacaagctgcagataaaatccattcatccttccgctctctcagctctgcaatcaatgcatccacagggaattatttactggaaagtgtcaataagctgtttggtgagaagtctgcgagcttccgggaagaatatattcgactctgtcagaaatattactcctcagaaccccaggcagtagacttcctagaatgtgcagaagaagctagaaaaaagattaattcctgggtcaagactcaaaccaaaggcaaaatcccaaacttgttacctgaaggttctgtagatggggataccaggatggtcctggtgaatgctgtctacttcaaaggaaagtggaaaactccatttgagaagaaactaaatgggctttatcctttccgtgtaaactcggctcagcgcacacctgtacagatgatgtacttgcgtgaaaagctaaacattggatacatagaagacctaaaggctcagattctagaactcccatatgctggagatgttagcatgttcttgttgcttccagatgaaattgccgatgtgtccactggcttggagctgctggaaagtgaaataacctatgacaaactcaacaagtggaccagcaaagacaaaatggctgaagatgaagttgaggtatacataccccagttcaaattagaagagcattatgaactcagatccattctgagaagcatgggcatggaggacgccttcaacaagggacgggccaatttctcagggatgtcggagaggaatgacctgtttctttctgaagtgttccaccaagccatggtggatgtgaatgaggagggcactgaagcagccgctggcacaggaggtgttatgacagggagaactggacatggaggcccacagtttgtggcagatcatccttttctttttcttattatgcataagataaccaactgcattttatttttcggcagattttcctcaccctaaaactaagcgtgctgcttctgcaaaagatttttgtagatgagctgtgtgcctcagaattgctatttcaaattgccaaaaatttagagatgttttctacatatttctgctcttctgaacaacttctgctacccactaaataaaaacacagaaataattagacaattgtctattataacatgacaaccctattaatcatttggtcttctaaaatgggatcatgcccatttagattttccttactatcagtttatttttataacattaacttttactttgttatttattattttatataatggtgagtttttaaattattgctcactgcctatttaatgtagctaataaagttatagaagcagatgatctgttaatttcctatctaataaatgcctttaattgttctcataatgaagaataagtaggtatccctccatgcccttctgtaataaatatctggaaaaaacattaaacaataggcaaatatatgttatgtgcatttctagaaatacataacacatatatatgtctgtatcttatattcaattgcaagtatataataaataaacctgcttccaaacaacaataaaaaaaaaaaaaaa

SEQ ID NO: 449 - DNA, 3212 bp, Homo sapiens
gaacccggtggctgcacagacaaaaaagccccgaatggctggagggcgttcagctgttaacagccttttggggcagagcacggatttgacagctccacaacgtgaggatatccactgaccccgcgagacggaggagaacgcttccccgaaattctctgcccaccaaagccagcgctgcaaggttgcaactttcaaactttgtttttccagaaagaagactgccctttcgtgtacaaggagagggtgagagggtgacctagcttgtagatcggctgaaggcaccagtggttccaaatgtcacccagatgtgtgttttcatgacgatttgatttctctgattttatttttacatttttcattttaaaaatacaaagcaatttttttggggcatgctgaaaggtaactgaagaccgcaaaggaaaaactattgtcatggctgaaggagagaatgaagtgagatgggatggactctgcagcagagattcaactactagggagacagcattggaaaacattaggcaaaccattttgaggaaaaccgagtatcttcgttcggtgaaagaaacacctcatcgtccatcagacgggctttcaaataccgagtcttcggatgggttgaataagctacttgctcatctgcttatgctttctaagaggtgtcccttcaaagatgtgagagagaaaagtgagtttattctgaagagcatccaggaacttggcattagaattcctcgaccactaggacagggaccaagcagattcatcccagaaaaggagatcctccaagtggggagtgaagacgcacagatgcatgctttatttgcagattcttttgctgctttgggccgtttggataacattacgttagtgatggttttccacccacaatatttagaaagtttcttaaaaactcagcactatctactgcaaatggatgggccgttacccctacattatcgtcactacattggaataatggctgcggcaagacatcagtgctcctacttagtgaacctgcatgtaaatgatttccttcatgttggtggggaccccaagtggctcaatggtttagagaatgctcctcaaaaactacagaatttaggagaacttaacaaagtgttagcccatagaccttggcttattaccaaagaacacattgagggacttttaaaagctgaagagcacagctggtcccttgcggaattggtacatgcagtagttttactcacacactatcattctcttgcctcattcacattcggctgtggaatcagtccagaaattcattgtgatggtggccacacattcagacctccttctgttagcaactactgcatctgtgacattacaaatggcaatcacagtgtggatgagatgccggtcaactcagcagaaaatgtttctgtaagtgattctttctttgaggttgaagccctcatggaaaagatgaggcagttacaggaatgtcgagatgaagaagaggcaagtcaggaagagatggcttcacgttttgaaatagaaaaaagagagagtatgtttgtcttctcttcagatgatgaagaagttacaccagcaagagctgtatctcgtcattttgaggatactagttatggctataaagatttctctagacatgggatgcatgttccaacatttcgtgtccaggactattgctgggaagatcatggttattctttggtaaatcgcctttatccagatgtgggacagttgattgatgaaaaatttcacattgcttacaatcttacttataatacaatggcaatgcacaaagatgttgatacctcaatgcttagacgggcaatttggaactatattcactgcatgtttggaataagatatgatgattatgactatggtgaaattaaccagctattggatcgtagctttaaagtttatatcaaaactgttgtttgcactcctgaaaaggttaccaaaagaatgtatgatagcttctggaggcagttcaagcactctgagaaggttcatgttaatctgcttcttatagaagctaggatgcaagcagaactcctttatgctctgagagccattacccgctatatgacctgatgcctttccttcattaaagatgattctggaatgatcagcagatatagtctacaagggggaaggtactaagccccaggaccaatggtagacaaaataattcagaaatccattgtgccatgattcctttagtttctgctatttttctgtggaaaaccactgctggcacaagcagtgactgtttggcagcttcaagtttagagctgtgaagacaggctgccattcacagtattttgctttttgacagtacaagatgctgtgtaactgttttaatacagcaaatagtaactctccaaatcctgttgcttttatgttaaataagataacaagaattggagcatgcaaagaatgggacttggataatgacttaagctttatatgtaaagaattttagaagatcttggtgctgctattcctgctggaggaatgaatagatggctgtttcagttaagctattagtaataaaagtgaacattgctactatctgagcctacatacataacttgtgtgatttcaaattaaacttgcattatgtgttaattttcttgcatctaaaaaagcatagaattcctactcacacagctcagcaacaaccattttgatggtaacagttaatttctttcattagttttttaaattcagggttctggatattaaattaaaatggcattcttaaagattttcttcaaaaagcaatcctaaatgaaagtgtgtaaattataagaagctggcgatcttttgatatgctgtttcacaggatcctgacactggagggcagctgtcttgtgcattacttgtgtttccagcaccaaagttgtgggacatgttgctgtagactgctgcgcagtcctgggtgcattcagtctctctgcctctgcctgcctcctggtccccactttaaaggctgtgcagctccttaaataataaagctggaaaatatttttagtcgggttatcaaatttgatttacaaaaacgctaactttgtttgaaatgcaaacaggtttgaaaatatgtattaagtactttgtattctggaagcgtgaattgcttttgaagtctgtcagtattactggtatttttaaataaagaagaatttttctccaattttaaaaaaaaaaaaaaaaaa

SEQ ID NO: 450 - DNA, 4726 bp, Homo sapiens
gaagccgctctgtgacccacctctgaatcccacaaaactgcaccagagagccgggcgcaagatgaaccagcaccctgtcggctcaagatgcaccagaccctctgcctgaaccccgagagcctgaaaatgtctgcgtgcagtgactttgtggagcacatctggaaacccgggtcctgcaagaactgcttctgcctgcggagcgaccaccagctggtggccggccctccccagcccagagcgggcagcctgccccctccaccgcgcctgcctcccaggcctgagaactgccgcctggaagatgaaggtgtgaacagctcaccttactccaagcccacaattgccgtgaagcccaccatgatgagctccgaggcctctgatgtgtggacagaggccaacctgagtgccgaagtctcgcaggtcatctggagacgagcccctggcaagctccccctcccgaagcaggaggatgcccccgtcgtctacctgggcagcttccgaggtgtacagaagcctgctggtccctctacctcccctgatggcaattctcgctgtcccccagcttacaccatggtcggcctgcacaaccttgagccccgcggcgagaggaacattgccttccacccggtgagcttcccggaggagaaggctgtgcacaaagaaaaaccctcatttccttaccaagaccggccctccacccaggagagcttccgccagaaactggctgcctttgctgggaccacatctggctgtcaccagggccctgggcccctgcgggaatccctgccctcggaggatgacagtgatcaaaggtgctcgccctccggggacagcgagggtggagagtactgctccatcctggactgctgccctgggagccctgttgccaaggctgcctcccagactgcaggttcccggggcaggcatggtggcagggactgctcacccacgtgctgggagcaggggaagtgttccgggcccgcagagcaggagaagcggggcccgagcttccccaaggagtgctgtagccagggccccactgcccacccatcctgcctgggccccaagaaactgtccctcacctcggaggctgccatttcttccgacggcctctcttgtggcagcggcagcggcagcggcagcggcgccagtagccccttcgtcccccacctcgagagtgattactgctccctcatgaaggaacctgccccagagaagcagcaggaccctggctgcccaggggtgacccctagcagatgccttgggctgacgggggagccccagcccccggcccacccccgggaggctacacagcctgaacccatctatgctgagagcaccaagaggaagaaggcagctccggtgccttccaagtcacaggccaagatagaacatgcagctgctgcccagggccaaggccaggtatgcacaggtaatgcctgggcccagaaagcagcatctggctggggccgggacagcccagacccaactccccaggtgtcagccaccatcacagtcatggcggcccacccggaagaggaccatcggacgatctacctgagcagccctgactctgcagtgggggtgcagtggccacgagggcctgtgagccagaactccgaggtaggtgaagaggagacttcggctgggcaggggctgagctccagggaaagccatgctcacagtgccagcgagagcaagcccaaggagaggcccgccattccccccaagttgtccaagagtagccctgtagggtccccggtgtcaccgtctgctggagggcccccagtgtcaccgctggctgaccttagtgatgggagctctggcggcagcagcattgggccccagcctccatcccaaggtcctgctgaccccgctccttcctgccggaccaacggtgtcgctatcagtgacccatccaggtgtccccagcctgccgcctcgtcagcctcggaacagaggcggcccaggttccaggcaggcacctggagtcgtcagtgccggatagaggaagaagaggaggtggagcaggaattgctgagtcacagctggggaagagagaccaaaaatggccccacggaccattcaaactccacgacctggcaccgtctccaccccacagatggctcctctgggcagaacagcaaagttgggaccgggatgagcaaatccgcctcttttgcctttgagttccccaaggacagaagtgggattgagacattctcacctcctcctccgcctccaaagtcgcggcaccttctaaaaatgaacaagagcagctctgatttggaaaaagtgagccagggctctgcagaaagcctcagcccatccttcaggggtgtccacgtcagcttcaccaccggctccacggacagcctggcctcagactctaggacctgcagcgatggaggtccctcgtctgagctggctcactcgcccaccaacagcgggaagaagctctttgctcccgttccgtttccttcaggctccactgaggacgtgtcccccagtggcccccagcagccccctccactcccccagaaaaagatagtgagccgggcagcctcttcaccggatggcttcttctggacccaaggctcccccaagcccggaacagcaagccccaagctgaacctaagccactcggaaaccaacgtccacgacgaatctcactttagctattcgttgagccccgggaaccgccaccatcctgtcttctcctcttccgatcctctggagaaagctttcaaaggcagtggccactggcttccggcagcagggctggcgggcaacagaggcggctgcgggagccctggcctccagtgcaaaggggccccctccgcctcatcctcccagctgagcgtgtccagtcaagcctccaccgggagcacccagcttcagctgcacggtctcctgagcaacatcagcagcaaggagggcacctatgccaagctggggggactctacacccagtccctggcccgccttgtagccaaatgtgaggacctcttcatgggcggccagaaaaaggagctccacttcaatgagaataactggtcgctcttcaagctgacttgtaacaagccctgctgtgactcgggggatgccatttattactgtgccacctgctctgaggaccccggcagcacctatgctgtgaaaatctgcaaagcccctgagcccaaaacagtctcctactgcagcccgtccgtgcccgtgcactttaacatccagcaggactgcggccacttcgtcgcctcggtgccgtccagcatgctcagctcccccgacgcgcccaaggaccctgtgcctgccctgcccacacacccccctgcccaggagcaggactgcgtggtggtcatcacccgagaggtgccacatcagaccgcctccgacttcgtgcgggactcggcggccagccaccaggcggagcccgaggcgtacgagcggcgcgtgtgcttcctgcttctgcaactctgcaacgggctggagcacctgaaggagcacgggatcatccaccgggacctgtgcctggagaacctgctgctggtgcactgcaccctccaggccggccccgggcccgcccccgcccccgccccggctcccgcccccgccgccgccgcgcctccctgctcctctgccgccccgcctgctggtggcactctcagccccgcagccggccccgcctccccggaagggccccgggagaagcagctgccccggctcatcatcagcaactttttgaaggccaagcagaagccgggcggcaccccaaacctgcagcagaagaagagccaggcccggctggcccccgagatcgtgtctgcttcccagtaccgcaagttcgatgagttccagacaggcatcctcatctacgagctgctgcaccaacccaacccgttcgaggtgcgcgcccagctgcgggagagagactaccggcaggaggacctgccgccgctgcccgcgctgtccctctactcacccggcctgcagcagctggcacatctgctactggaggccgaccccatcaagcgtatccgcatcggcgaggccaagcgcgtgctgcagtgcctgctgtgggggcctcggcgcgagctggtgcagcagccgggcacctcggaggaggcgctgtgcggcacgctgcacaactggatcgacatgaagcgggccctgatgatgatgaagtttgcggagaaggcggtggatcgcaggcggggcgtggagctggaggactggctttgctgccagtacctggcgtctgcggagcccggggccctcttacagtcgctgaagctcctgcagcttctgtgagccaagccccagcctgcaccgtcgctgccccttccctgcctaaccctttcctgtctcgccttggaagcacccatgtctccctgggaaatggtacagatgactgggatacctggatgtaaaatatataaatatatatatagaaaatacatataccatatataaatatgaaagactaaggatgctgttgcccgtccacactcgtctcctctctgcactaagtcctccctgttttcttctgtaattatacacatttccagttccatgcaacgtcctgaggacagttctgtgaactgaatgcagcctggacactggcctcaataccttgtttaggatttcttcacccttttgtcaaattgttatttaaagaaaaaaaaaaaagaagaaaattccattaaaattttttttggttgagtcatga

SEQ ID NO: 451 - DNA, 6162 bp, Homo sapiens
attgatctctgttgccgctcagggaggtcagctccaggccctcagcctttcggccgggagccaaactgccctgcctgccaagcccctccttctctgcaccttaaacagccgcgaggggagagtcggctgggattttcttcttaagaagtcgcgcaggtttttcgagctccactctgcgccaggagagccacggcagcaggaacgggcactgctgccaccgggccgacggagctgcatcctgtggccctataacactcttctccaaaaggacctgccagagactgggagtgttgactgctgcaaggaccaaggtgggatagtaacatctttttgagggaagaattggcttcctttcttgaaagtggtgaaggtacagcatatagctgcatggaagaaacagtaatcggatggctaccttctacattttgtattaggaaacaaagtccattgtaagagtccatgttgatcttggaaatagaaggattgaaaaaagctaaatttccacaaagaacaagaacttgaccatctcctttttgatctgaagactaggggacaatggatatcatagagacagcaaaacttgaagaacatttggaaaatcaacccagtgatcctacgaacacttatgcaagacccgctgaacctgttgaagaagaaaacaaaaatggcaatggtaaacccaagagcttatccagtgggctgcgaaaaggcaccaaaaagtacccggactatatccaaattgctatgcccactgaatcaaggaacaaatttccactagagtggtggaaaacgggcattgccttcatatatgcagttttcaacctcgtcttgacaaccgtcatgatcacagttgtacatgagagggtccctcccaaggagcttagccctccactcccagacaagttttttgattacattgatagggtgaaatgggcattttctgtatcagaaataaatgggattatattagttggattatggatcacccagtggctgtttctgagatacaagtcaatagtgggacgcagattctgttttattattggaactttatacctgtatcgctgcattacaatgtatgttactactctacctgtgcctggaatgcatttccagtgtgctccaaagctcaatggagactctcaggcaaaagttcaacggattctacgattgatttctggtggtggattgtccataactggatcacatatcttatgtggagacttcctcttcagcggtcacacggttacgctgacactgacttatttgttcatcaaagaatattcgcctcgtcacttctggtggtatcatttaatctgctggctgctgagtgctgccgggatcatctgcattcttgtagcacacgaacactacactatcgatgtgatcattgcttattatatcacaacacgactgttttggtggtaccattcaatggccaatgaaaagaacttgaaggtctcttcacagactaatttcttatctcgagcatggtggttccccatcttttatttttttgagaaaaatgtacaaggctcaattccttgctgcttctcctggccgctgtcttggcctcctggctgcttcaaatcatcatgcaaaaagtattcacgggttcagaagattggtgaagacaatgagaaatcgacctgaggagcaaaacaaaggcatcagctcttacaccaaaagagttaacgctgtaaccaaaggtatagttttgttttttattttaggagaactgactggtaaatgaagaaatggaccaaattttgtgtaaacgattagaaagatgaacaaagtattgccctttgactggttttcttcttcatcctgagaaagatacattctcttgcagctcttcattcattggtgacaagcccccaccccgggactttactaatgagcttgttaaagaggtgccaaagaacatattcctcctttctttattctttctccaccaaaaccctctacttcagaattttttcaggatatttttcagcccaaggtcagaagaatgtgttaatattttaaataaaatatctggacatctacagccactgtgtaaatagaactgcctaatgttgagagtggtttttagcattaggtttagcaagggggagatccgtgggttgtgcgtcagctttgggtgaattttgtttctaccctgtcacggggaaagttcgggttgagtccaggagtgcacactgctgctgccacccaatgcgctacatatcacttttttttgttttgttttgttttgtttttaaaagatcattttatcttaaaaaggaaagctgatccaagtaaacacgaaagtatttgacacaccccacagattttacatgtgtgtaaatgtttcactttaaaatctctatgacagatacacaggaaacatgagatggtttctgctaatgagtggcccttgagtacacacttagatgctgtctgccctgtaaatttggatctggtgccccagggcagtcaactcttctagcacaggctgaaaacacgtgtgtgtcaactgaggttcacaccacttggggaatgagcctgttttctttccaggtcaggccctggtgtgagatcaattttagggctcctaattggagcacagaaatgtatttggtcaaatttcattgaaggtgatttcttcctttttctgttgtactttatggaaaaaccaagatggaacctgaaagttaatgtatccttgcttttagcaagagactcagtttcttataactagtcctaaggacatatgccgcaattgagtaattttacttttaccctatgaaaataacatggtgctgcactataatatactctcggaatcagtgtgttagttacagctatacagtgaagggggataactgtttctaaatttctttaaggtgatgccaaaaaatggattaaaaaatctgatcagatttaatgttaccagatttagtgcattatttaatgctattggatcttttggataattcttggcttaatttcttagctacttgaaggttaatttgcaagacttttaaaaccttagaaaagttttaaggttgcaaagttatcaacactggggcagagggtggagaggccaatgcgggtagaaggaggcagttatgtttatattgaaggtgaaatttttctttcatttagaatggaaaacatccccaaatgtatcattataaactagtcagccttgactacacaaaattgacctttaagttgcttgagaaaaacacaatgcaaatcgttcagaagggtcaacatcctttggtgctaaaatcttgtgtatgttttcagaatggctttttctgtatgttatagaataatcactaaaggaaaggtagttgaatttaaagtcatgaagcaagactctttaattcagttattttaaacaagaattaaaaccccaaacatccttggcaggctttgaagcacacagaattttctagtatttcttattaaatacaccaataataaacatatacttagtttacctgatgagtttagacataattctatataatgttcgcttatattcatttattaactagcaacacttgtgcaagaacaaggtattctgcttgaaaacactgatttttaagttcctgttgcccgattgtaaagaaaatcatctgacacagaagcctggattttgctctcctaacactggtgttttccttgagcctctaattcaaataaaacaaactgatacaccttacagccttattcatctgtgtctggataactcacttttcatctattgaataagaaaaagtgtttaaacttaataaaataaaaaattgtgcaccaattactacagatccttgaaacagtaagccttggattttagtcaagtaatccagtttttttttaatttaaaaaaaaccatcaccttttaaagaactttaaaaacacctgtgatgccaatgtggacattgccgctgccatgtctttacacgcatgtgtcgtatagctctgtcatcgagttgaggaagtccatggtttgcaaataagggtgggggaatcaaaatttcaagatggaaaaataaaacaaatagtaaaacccatttacatgtaggaaagaaaagttgagcttcaacccaatgtgccactttgatataaaacaagtatgatatatatataaactgaagatataaaacaagtatgatcttgcctttgaaatcataaatgtttggggtacctgttctttgccagttaagatacatatcttattatctttgtttttttcaagtctatgctcctgtttgaagcttttcctgtaatttaggttgtctgtgaaatacctataacatataattcctatagagtatgccacattttttttctaactcatttcaaatgaaattctctcagattctagtttttgagcttgtccactagatctgaaaataaagcatcctttcctgagtccacttgaactaattgtgaatttgttacttaatttactggcatcttgggaaacaagttttgctgtggcaggaaggctgttttgagagtgagcgttgagtctactctggtttgtggatgacattgcattagggttatttcctgtattaccagtgcccccttgtggcaatatactttatgacttggaatgcaaacaccacttttaaaagcctgttttcaagtttttgaaaggcatttgttttctgttgtttgccaataatctgaaagtatcatgtgaaaggaattattttaaaagcattttaaacctttcccaaaggtaaaatgtgctcagattataggcacttgtaattctaaccttgtatccatttgatcaaagaaaatttgtagaacatttttacctctcatgatcacaatcattagtgtctccctttataacgacctatgttttgtttactttgaaacaccaaatttgttgtcttggttttttttacatgacagaactcatgcagtttcttttttagttgaaagttcacatcttgccccttgaatagtttgaacatttctttcttaattcttttttgtttttgttttgcactgtaaaactgatgaaaactttaagccaatcttaatgcactagcctctgtagtgtaaggaagtgtgagaaggagtttcttaatgagtttacacgtttaaatcaagcatattataagttatatgccatgtgttgaaggcttttctatttatatatataaagatttttagtatttgtttttagtgtccttgtgttgcaataatttaactcctttgactcagttgctgaaaatatttcttctattaagaagtgctcttgacttcaacacccaaacactgaaaatcatgtcaatgttacccaaagataagtttttatacagatacacaccttataagttctgatttattttcttactcattatgctgtgttctaaataaatcatgaatgagaagagtgctttattgtgaaattatttaaaactgtcctttaaaagaaaaagaggaaacgatgaacaaaaactaatctaattgccaagttagaattcattatttaatttacctcctatgcaatgattaatgctgcaaaatgtatggttatgttaccgtatattcacaaaagaaatattattacaaggtttcagaggtagccaattgcattcttttggaaatttactgtactgtttcaatgtgttaagtgccttgttgtaaagtaaaattttaagtctagattcattattttcctgacatatatttttcattatgatatctactgtatgctattgtgatagttttatgaaatgcttacattttaatcaaatatgtaaatttcagaagctcttttttcctacccaccagtaccttaatcattggtttatcacattggattcaaattcaggttccttttttgataaagaggaaatttgttttccatgcttgtgattttgtgtttgtaaacatttcaggaggaatttaggagtgtaactatagtttatacttctataatgttgtcttacatttacatttttaagtgcctaattgttaaaactgatttatgtttctcttctaaagaggatatgtgtacttggtttctaatctctttggttttgctttttaaaaaatgcaagagcctatactttgtatttacctaataaaccacagtgacatcaacagtcttttcaaaattaaaaaaaaaaaaaaaaa

SEQ ID NO: 452 - DNA, 2426 bp, Homo sapiens
atgtgggggatggtgggtgggtacagagagctgggagggaggcaccccggggggcggggcgtgggagactgtattcgggggcgcgagctgccccagtaaatggaaatgttttctaacatataaaaacctacagaagaagaaaataattttctggatcaaattagaagtctgtattatattgatgtctccagattcaaatatattagaaagcagccgtggagacaaccatcttcattttgggagaaataactaaagcccgcctcaagcattagaactacagacaaaccctgatgcgacctctccagattgtcccaagtcgattgatttcccagctatattgtggcctgaagcctccagcgtccacacgaaaccagatttgcctgaaaatggctcggccaagttcaagtatggcagattttcgaaagttttttgcaaaagcaaagcacatagtcatcatctcaggagctggtgttagtgcagaaagtggtgttccgaccttcagaggagctggaggttattggagaaaatggcaagcccaggacctggcgactcccctggcctttgcccacaacccgtcccgggtgtgggagttctaccactaccggcgggaggtcatggggagcaaggagcccaacgccgggcaccgcgccatagccgagtgtgagacccggctgggcaagcagggccggcgagtcgtggtcatcacccagaacatcgatgagctgcaccgcaaggctggcaccaagaaccttctggagatccatggtagcttatttaaaactcgatgtacctcttgtggagttgtggctgagaattacaagagtccaatttgtccagctttatcaggaaaaggtgctccagaacctggaactcaagatgccagcatcccagttgagaaacttccccggtgtgaagaggcaggctgcgggggcttgctgcgacctcacgtcgtgtggtttggagaaaacctggatcctgccattctggaggaggttgacagagagctcgcccactgtgatttatgtctagtggtgggcacttcctctgtggtgtacccagcagccatgtttgccccccaggtggctgccaggggcgtgccagtggctgaatttaacacggagaccaccccagctacgaacagattcagtcatttgatctccatctcatctctaattattataaagaattaaaacaagtcatcattgtagaaaagcaagaaaatgcagatagagaaaaagaagaaaataaaactggagtatttccacaacccaagtttagagttggcccccacctcccatgccatggactgagcagcaggggcccagcatcccttggatatggtggctgtgtcttcatgtgaaagaaactgaacttggtggtttttcctgccagttcaggagagattcttggcatgtaatatatatcactgctcaagtcaagcctcctaaaaccacagacctgtttcagctgctacttcagccaaaattcttcagcttcatattgtcttgaaaacctatgattgtctctaacaaacaggctacttgctagttagaaattcttatcaatttggcaagctacttatcaaccagactgaccacaagaactgtcatctcatcaatgaaggagtaactgatcaatgaagccagcaatgcttttttcttggcatcatcaaagctgacatttagaagagatgctggtgatagtcatctcatcctactcaatttttcaaaggcagaaaccaaccctggagcaattgagaggactgtttaaacacagagcttaacaatggcagaattgtatatctcgtgcttaacagattttggttgaactttaccctaggtcaggggtcagcaaactactgcctgtgggccaaatttgcccaccacctgtatctgtaaataaggtttcattggaacacagctgtggccatatgtttgtatattgtgtgtggctgcttttgcattaggatgacagaggtgaatagttgcaacagagactggctggtctgcaaagcctaaaatatgtcctgtgtggccctttacagaaaaagttttctaacccctgctctaggttacggagaaaaaaaaaatggaataatgttctctgctacttttaacctgattttctttgttacctaaataggcagctagaatgctgcctatattttaataaggatttggatctcacaagacaccttaggccttacacaagttgttcagattctttgccccagttctaatctagtgacaaaggcatagaattctcctcccacaggaatgtatttctattttcaaggtgttaattagttccagttttggttttgtcgttttccccatgtccgatgcttatattggatgatttctgataaaccctgactattccaataaaccctaggcatttttgaatttaaaaaaaaaaaaaaaaaa

SEQ ID NO: 453 - DNA, 7202 bp, Homo sapiens
gatgtgtgtggggttcggagccgcgccggcacagccgaagggagcgggcgagcggcgacggcggcggcggcgggcacagattaattaaaagaagaatgaactataatccttgaagataactgggcaattttttaagtcggaggctgttcttactggtgtgaggatttacacacgtcttcagtttttcagcacagaccagcagaccatcatttttagaggaaatactccctctgccctcctttttggtttccttggtggtaaagattaaatttggttgcatcattttgacttgtgtttgagtctagattttatggcacaaggaatggcataaacttttcatgtgttttggttaaaacaaaccagaccattgcattgaccctggacatctttaattgagaaattggtaactttattttaatatgtatatctgaagaattcaagaaaacaaaggcatcctcagaggtgtgcctcttttctttattattagaggcaaaacgaacaattttataggatttgtagtgaaattataccagattataaggagaaccaaaactaagtcgcaaaatttattaatttaaggggctctcgctttgaaagtttgagagtaagttacgataggcatttgtatccattcattactttcctcttttcaaataagcaactaaatagaaatgctaatctcagacttaattatttaacagaagagtgtaccatggaaaacctccagacaaatttctccttggttcagggctcaactaaaaaactgaatgggatgggagatgatggcagccccccagcgaaaaaaatgataacggacattcatgcaaatggaaaaacgataaacaaggtgccaacagttaagaaggaacacttggatgactatggagaagcaccagtggaaactgatggagagcatgttaagcgaacctgtacttctgttcctgaaactttgcatttaaatcccagtttgaaacacacattggcacaattccatttaagtagtcagagctcgctgggtggaccagcagcattttctgctcggcattcccaagaaagcatgtcgcctactgtatttctgcctcttccatcacctcaggttcttcctggcccattgctcatcccttcagatagctccacagaactcactcagactgtgttggaaggggaatctatttcttgttttcaagttggaggagaaaagagactctgtttgccccaagtcttaaattctgttctccgagaatttacactccagcaaataaatacagtgtgtgatgaactgtacatatattgttcaaggtgtacttcagaccagcttcatatcttaaaggtactgggcatacttccattcaatgccccatcctgtgggctgattacattaactgatgcacaaagattatgtaatgctttattgcggccacgaacttttcctcaaaatggtagcgtacttcctgctaaaagctcattggcccagttaaaggaaactggcagtgcctttgaagtggagcatgaatgcctaggcaaatgtcagggtttatttgcaccccagttttatgttcagcctgatgctccgtgtattcaatgtctggagtgttgtggaatgtttgcaccccagacgtttgtgatgcattctcacagatcacctgacaaaagaacttgccactggggctttgaatcagctaaatggcattgctatcttcatgtgaaccaaaaatacttaggaacacctgaagaaaagaaactgaagataattttagaagaaatgaaggagaagtttagcatgagaagtggaaagagaaatcaatccaagacagatgcaccatcaggaatggaattacagtcatggtatcctgttataaagcaggaaggtgaccatgtttctcagacacattcatttttacaccccagctactacttatacatgtgtgataaagtggttgccccaaatgtgtcacttacttctgctgtatcccagtctaaagagctcacaaagacagaggcaagtaagtccatatcaagacagtcagagaaggctcacagtagtggtaaacttcaaaaaacagtgtcttatccagatgtctcacttgaggaacaggagaaaatggatttaaaaacaagtagagaattatgtagccgtttagatgcatcaatctcaaataattctacaagtaaaaggaaatctgagtctgccacttgcaacttagtcagagacataaacaaagtgggaattggccttgttgctgccgcttcatctccgcttcttgtgaaagatgtcatttgtgaggatgataagggaaaaatcatggaagaagtaatgagaacttatttaaaacaacaggaaaaactaaacttgattttgcaaaagaagcaacaacttcagatggaagtaaaaatgttgagtagttcaaaatctatgaaggaactcactgaagaacagcagaatttacagaaagagcttgaatctttgcagaatgaacatgctcaaagaatggaagaattttatgttgaacagaaagacttagagaaaaaattggagcagataatgaagcaaaaatgtacctgtgactcaaatttagaaaaagacaaagaggctgaatatgcaggacagttggcagaactgaggcagagattggaccatgctgaggccgataggcaagaactccaagatgaactcagacaggaacgggaagcaagacagaagttagagatgatgataaaagagctaaagctgcaaattctgaaatcatcaaagactgctaaagaatagaaactgttaaagagattcatctgtgtattactgacaaggttttttttgtttgttgcttgctttggtaattgaattctgaagaatttatctgcatgacgataactaggcattctatccatttgtagatcagagaaagtgaagagattatatattagtacttaaatttttacattttccaaatgaatgaaaatgtatgtttctttgtacttttttaaaaaaatcagcttagtaacaatactatatggtttcaactagtaggtaatctgcttatatttctaatgcaaacttaacaattgtgtactttttaaaagctgcaatatgtgttggaaaatagctgtggtcaattttgttatccatatttcagactcaattttagatacaatggtggctttatattttaagtatatagagctactcaaggagttgaatctccccttttctcattaacacaatttttctaagttgatatggtgtactcattaacatacaccaaatttacttttactttgttcagattgtggaatgaatttccaccagttctcttctttttaatgtgtaccctaggaggaattttactgaggttatagcataccccatgagcacagtggggaagaagaatgtgttgttatgtgctgctgctaaacagaagcagcagttgtaatttgtttttcagtttaaatgtggttatagttagatttttttttaagcagcaacttttcaaaaataaaatgtgataatttctgaacttttgtttgtgttgttaatagtggtgtgaaaatattaacgttcttgagaaaaactgataccactgttgtgtatcagtttctatacaatccataatcctcctgtacagtttttacatgtagttatgagtcttactaaaatttatataatggacttgttttcctttaagttgtaaaatgttaaacaccttgaaggttattttggacttctgtatgtttaaatgttgtcttaccaaaatttgcacgaatggaccattttcatttactacttaatatcaaaatcaggaatttacagtcaactgatagtacatgataggtgcatataggacagtttagttacctgctactaaaagatttttagataagttttagaagataaaggaattccatagtttcaggagggacaacatcttctgcactttttttttgcacagaaaagtctgtcattctctaatggcaaatttcatatttgttaattcttggctcaaaatatattaggtaaaattcttagatctgtttttaaagggagtttcctgaaactatcattaattgacattattaccccatggattttatgggataataaatgtttttcatgttctcttataagatactatgtatgaaattacttcagagagctatatttattttaaaataaattagctagggttaaggttatattctatttccagcatagaaggtagataatctaatggtgtagaaagaatcactaggttgtcatttaaccagttattttcatattttgcttaatagtacatatccaaaaagaattttgtacttccccaaatgtaatttatttactaaattgagtataacctaaatgtgtgttttctattttccatttaaattttgctatattaagactaatttaattcgttgagtcttggaatcttctcaaggaggaacaaatattaaaatgacatgtagaaacaaatttttttttttttttttttttttttttttttgagacagagtctcgctgtctcccaggctggagttcagtggtgcaatctcggctcactgcaagctctgcctcctgggttcaagccattctcctgcctcagcctcccgagtagctgggactacaggcacccaccaccactcccggctaatttttagaaacaaatatttaaaatgacatattctcccaatacaatctatttagatctggagaaggaaaaatcagatatttatgatatagttttattttaattttgaattatttgtgtcacagctcagctttttggaagacaaactcaaacacctataatttcatttatatttctaattcacttggaacctttctgctttatgttacctagaaaatgataatttgtttaacccaaaacttctaaaataaattgcttaatccttgaaatatgttattggaaaattttaagcagtgcttaaacaccattaaattattatgaacttgtaattcagaattgagtaaagaaatattttttctagtccttcatatattgaaaacttgccacatgacattgtatcgtcttcattttccagaagatgcgttggtgtgccataggtttctaacttccttgaaaatagttttttaagtcaattgtaaatatacgtattattgttaaaagtaactttaaactgcaacacatagcttcaaaacaatatagagattttgtaataccttataagtggagttggctaaaataccttatccatataaaacttattctattctttgcatgcttattttgtgtgttggttgctagcttaaagtttgatttgttgttactctttgtgtgccaaattcactaggcaagcggatttttcctcagacttcaaaaaataattcttttaagaaaaaatgtaaaaatgtttattctaaaaagctgcattaaagggacaacctataaaaagttttgctagctcatctttagaaggaagaaagaatattagcttgggtgatgtttaatttgggtggcgatagtttctgtaggctaaactttatgagaaaagtgtacctactctataaaggtaataaatgtaaaacctcttgctgttattgaggaagctcttcaactaccctaaatttcacaaatgtaacttataacactatgaaaagatttgaccaacaatttacgtttgctgtgtgctttagtttttgtttaagcatattcttttgcttgaatttctgtgttcatgagagttagggtgttttatgcttcttgaactaattttataacatatttaatatattaccagttaagatataaaatcatttgtacatagcgaattgtaaagcagctattaaagtaggtgaaataaagtatatatttgccggttatccatatcttttagaagtcctgacagaacaaccagtttatttgcacataggtagcttctgtttgaaggaaggtaaagttataaggaaactcaaatactataagatgtgtcaaggtatttctccagaattaattgcaaagctagtgctgaaggattttaatcagcttctaaaattttcttctcaataaggcatatgttttgattacttagggaagattcctcatttttatttgccctttatgcatttaatccacatgataggacattaaaaattaatataaagaaaaatcgtgctcatactgtacatctgtttctgtgcttggaactacttgttaatagtttttatcgaagctgtcagcaataagggacataaaactgctgtattatacattgtggaattgaataaacagcctaattttttttttctagtatagggtacttaagcatttccacttttggaagaaaagtgtattagtattttatattgcatttcatttaaaaggacagttttttttttttttttgtaaatccattcattgaaatggtttctaaactgtataatgtaatttggagcctatttagtaatagaattaaatgtcctatgtagtgctacaatttttgaattagaaagtgatcaaatgtaagaaaaaaatttaaaaattcagcccagaaaacaaaatagtgtattaaattagtttaatgtaaaaggaatttataagatttttttcctcaatatagatacctcacttgaaaagaaagcacagcatacttaaagtagttctagtaaacatgtcctagaaaacagttgctaaatgtaggacatcttttgaggaattagtttatgagaaataaaattttacttgtttttactatcctgttagaagtatttgtttatcctgataattttaagccaacatagtagtcttaaattacttttgaatttctaatctgtgaaggcagtaaatgaaatatctgttctgcaactgttgaaacaaataattggctacattgaccataattaaagttaaaattttgccaatgatgtacagttttatggttaaagttgctgtggttggttgcattacatgacacagaaaactgtcctctacctcacgtgaaataaatattttatatggttttactaaaaataagactcatgtatctggtcacctagtttacaaattttgaattatatttattgaaacatgacatactgtgctctgagcttatacctcaattgtattttgtgctgttttccattttcatgccttgtaaataacttgtatagattgtggatcaaatactaaataaaaacttttaatgccaattaaatttgattcaagttaaaa

SEQ ID NO: 454 - DNA, 4411 bp, Homo sapiens
agccaaagctataaacttcaaccggccacaagagtgtgcatgtgaggtgactgcattttttttccctgccaaaccagaattagccggtataggaatgaacgagcatgaagatttgaaattgctccgattggaaggaagcccaggttaggtttgggcacctccaaacgcacccgttttaaagccacctggactgaggcgtcgagctttcagctccaccaaacgctcacctggcctggcagcgagcggcggaagagcccgggagcccctcacagagcgcaccgagccgggcggagagctgagccgcaggcacccgcgtctccaggatgataggcgacattgcaacaaatctctacacccagcagctcagggggctccaagcagagcagcaagttcgaggatccgggcgtggagccgagtgaggccgcagcccagcgggcctcgggcgaaaaatcttggaaaatgtataccagtcatgaagatattgggtatgattttgaagatggccccaaagacaaaaagacactgaagccccacccaaacattgatggcggatgggcttggatgatggtgctctcctctttctttgtgcacatcctcatcatgggctcccagatggccctgggtgtcctcaacgtggaatggctggaagaattccaccagagccgcggcctgaccgcctgggtcagctccctcagcatgggcatcaccttgatagtgggccctttcatcggcttgttcattaacacctgtgggtgccgccagactgcgatcattggagggctcgtcaactccctgggctgggtgttgagtgcctatgctgcaaacgtgcattatctcttcattacttttggagtcgcagctggcctgggcagcgggatggcctacctgccagcggtggtcatggtgggcaggtatttccagaagagacgcgccctcgcccagggcctcagcaccacggggaccggattcggtacgttcctaatgactgtgctgctgaagtacctgtgcgcagagtacggctggaggaatgccatgttgatccaaggtgccgtttccctaaacctgtgtgtttgtggggcgctcatgaggcccctctctcctggtaaaaacccaaacgacccaggagagaaagatgtgcgtggcctgccagcgcactccacagaatctgtgaagtcaactggacagcagggaagaacagaagagaaggatggtgggctcgggaacgaggagaccctctgcgacctgcaagcccaggagtgccccgatcaggccgggcacaggaagaacatgtgtgccctccggattctgaagactgtcagctggctcaccatgagagtcaggaagggcttcgaggactggtattcgggctactttgggacagcctctctatttacaaatcgaatgtttgtagcctttattttctgggctttgtttgcatacagcagctttgtcatccccttcattcacctcccagaaatcgtcaatttgtataacttatcggagcaaaacgacgttttccctctgacgtcaattatagcaatagttcacatctttggaaaagtgatcctgggcgtcatagccgacttgccttgcattagtgtttggaatgtcttcctgttggccaacttcacccttgtcctcagtatttttattctgccgttgatgcacacgtacgctggcctggcggtcatctgtgcgctgatagggttttccagtggttatttctccctaatgcccgtagtgactgaagacttggttggcattgaacacctggccaatgcctacggcatcatcatctgtgctaatggcatctctgcattgctgggaccaccttttgcagggtggatctatgacatcacgcaaaaatatgatttttccttctacatatgtggtttgctttacatgataggaatactctttttacttattcagccgtgcattcgaattatagaacaatccagaagaaaatacatggatggtgcacatgtttagtatcatgtaatgttccgtgtaggtttcattgtaatactcatgcctacctcgcatggttgctgtgaggcacctatgacaggacgtgggaaagcattttgtacggtaactggcactgtcatttgtaaatgccattgtcacagcctcatttgtaagcagcactgcctctctgtttggggagatgtaatgctggaagatcttaaggactacatacattctagagatgacagtgttgttcaaagacagcctagtaagtaattggtagaaatgcccttataaaaaccattctcttgtcatctactgggactagggttttaaatacagcttttaaaaacaaaaacagggaataaaagcttttcaactcaaccacttctttgtaagacaaaactgaagtatctgtgtgcttccagaaagcttacagataaatgggtttcaagcacaagaatatgactagatttcagaaattaattattacagggagctattgatctactagcatcaaacaaaggcaagctctaattccacaggtaatacaatttagtgcaattaaagaaacacggcttgtatttttatgagggaattctgcagctagggattgtgactcctaaatcctcctctaaaagaaggcacttgccattaatcctaattcagtgctatccagttataaatggaatcttgagacaaaaccttaacaaagaaataacagtaatgatttccttagcagaagccgtatttgtacgcacaacattaaatcaagggctacaattcaagcacttttattcgtatcattggcctcttagatgatataagcatgaggtggggcctgtaatatttttttctgagtttcttctgcccaaaaatataatatagaactaattgctaactgacaaataaagttaatagttaaatcatctccaaggaatgttgctaatccaaagtataacactatcaatttgtgaggataataaatggaatgccattagtgtagatgtctgtgccacatctgacactggagtagtgataacaaatagcccatctctagactctcgtgttgttatatagaccattcatttgcctgagcgtggcacagttttaaaaatagttctcttgattgatttcatacagaagatgactgtgatccatgacatctaataatgccctttctttatctgagatgtctatttttctaagccaaacgtttttcagactgcagaatgttcttcccagatcatttgaaatttctggctgccttacttgtttacagatagtttaagactatttaaatttctactcacaatttgatcatcacacacacacaaatccttgaatatcattgccagtgtcttaggtcaaatttacctaaagtgaatacagcccattctcaattatccttcacaattagacgcaggaatgctactaggaattggaatcaaacaatgccaccccaagcgtaattttagccagcagtttcagttatactcaaccatgcccttctgagctgttaacaagtgattcaatggacaagttctctttttgttccatctccattatttcctgctctaatgtatagtgggagtggttgtgtaatgaaaggaccaccaaaataataaaaggcagctaatggaaaggagagacaaaagcatggttaatatatatacttaatattacctccaatgactcgggaattgcctgtaaattattatagacaatagattgcatgtcatactccatttggttcaacacaacaacctatgtgttatcattacagctttggctgctgttaaagaatccagctctctattttgataaagataatcttaaagctgaggcaatgctccctcctctatctctctctgtgtaatttaccatagaattaggatgattagattgaaacacatgttgtatgttttaaaaactacattgcttcattactttcattttccgacaacatcaaactaacaagaggcagtgttaaatattttaaatggtgctatagccaatgtatttgaatgcttgcactgctggttgtgtatcatcaatatgaactttttatccaatgactcaactctaattacatctaagttagacttgctcacgttcagtttgtacagttgtgtgttgacttactatgttttgaaagtggtgacttctaccgaatgagtggaagttcccattgtcaaaaaaaataaagacctgcttgcagtattcatgttgacaacagagtaaaagagaatactgtaaagaattactgcaaatatttcctgtttatgttatttgccgttgtttgaagatattataaagggttaattgtatatttatatcatgtgctttatcgttttcccctcatgtatccaagtaatttttatttacatacaactaaataaatgttgtcctctttgaagacggtcaaaaaaaaaaaaaa

SEQ ID NO: 455 - DNA, 5768 bp, Homo sapiens
cccttcacacccgaccctgccttgaattaggattccataggagagctgggggcaggagaatggggtgttccctgctgtccagcttcagacccactctttgagatattggattctgacaagtttccagagctgagaagacagccagatgtcaaggtctgaagggttgtggataccccctggctgggcttcatggagaaatcttctctgatcaccaacctgaatcccagagtagcctccatcttaggacagaatgagaggccttctgtaaccagatataactggccagcatggggaaattgatcaggatggggccgcaagagaggtggttactccggacaaagcggcttcattggagtcgcctcctcttcttactgggaatgttgatcatcggttctacttatcagcaccttaggagaccccggggcctttcctcattgtgggcagcagtctcttctcatcagcctataaaactggccagtcgggacctctccagtgaagagatgatgatgatgagcagcagcccttcaaaacctagctccgaaatggggggtaagatgctggtaccccaagcctcagtgggcagtgatgaagcaacactgagcatgacagtggagaatatccccagtatgcctaaaagaacagccaagatgatcccaacaacaaccaagaataattacagcccaacagcagcaggtacagaaagaaggaaggaagacaccccaacatccagtagaacactgacttactacacctcaacttcaagcagacaaatagtaaaaaagtataccccaacacccaggggagaaatgaagagctacagcccaactcaagtgagggaaaaggtgaagtatactccttccccacgtggtagaagagtaggcacttacgtgccgtccacattcatgacaatggaaacaagccatgcgatcacccccaggacaacagtgaaagacagtgacattacagcaacctataaaatactcgaaaccaactctcttaagagaataatggaggaaaccaccccaaccactctcaagggaatgtttgatagcaccccaacttttctgacacatgaggtagaagcaaacgtcttgacttctccaaggagcgtcatggaaaaaaacaacctgtttccccccagaagagtggaaagtaacagctcagcccatccctgggggttagtgggaaagagcaacccgaagactccccagggaacagtcctgttgcataccccagccacctctgaggggcaggtgacaataagcaccatgacaggcagcagcccagcagaaaccaaagccttcactgctgcctggagtcttaggaatccttcacccaggaccagtgtatcagccatcaaaacagccccagccatagtctggaggctggcaaagaaaccttccacagcacccagcacctcaacaacccctacggtcagggcaaagctgaccatgcaggtccatcactgtgtggttgtgaagccaaccccagccatgctcaccactccctccccaagcctcacaacagccctgctcccagaggagctcagtcctagtccctcagtgctgcctcccagcttgccagacctccaccccaagggagagtaccccccagatctgttcagtgtggaggagcggcggcagggctgggtggtcctgcacgtttttggcatgatgtatgtgtttgtggccttggccattgtttgcgacgagtacttcgttccagccctgggtgtcatcacagacaagctgcagatctccgaggatgtggcaggcgccacattcatggctgctggaggctctgctcctgagctcttcacctccctcatcggtgtcttcatttcccacagcaacgtgggcattggtaccattgtgggctctgctgtgttcaacattctctttgtcattggcacttgttccctcttctcccgagagatcctcaacctcacctggtggcccttattccgtgatgtctccttctacatccttgacctgataatgctcatcctcttcttcctggacagcctcattgcctggtgggagagcctgctgctgctgctggcctatgccttctatgtgttcaccatgaagtggaacaagcatatcgaggtctgggtgaaggagcagctcagcaggaggccagtggccaaggtcatggccttagaagacctcagcaagccgggcgatggggccattgcggtggatgagctacaggataacaagaagctgaagctcccgtccttgctgacccgagggagcagctcgacctctctgcacaacagcaccatccgcagcaccatctaccagctcatgctccacagcctggaccccctgagggaagttcgccttgccaaggagaaggaggaggagagcttgaatcaaggggccagagcccaaccccaggccaaagcagaaagcaaaccagaagaggaggagccagccaagctccctgcggtcacggtcacaccagcccctgttccagacatcaagggagatcagaaggagaatccaggcggtcaggaagatgtggctgaggccgagagcacaggtgaaatgccaggcgaagagggcgaaactgctggtgaaggtgaaactgaagagaaaagtggaggtgaaactcaaccagaaggtgaaggtgaaactgaaacacaaggaaaaggagaagaatgtgaagatgaaaatgaagcagaaggaaaaggagacaatgaaggtgaagatgagggtgaaatccacgcagaagatggtgaaatgaaaggtaatgaaggtgaaactgaaagccaggaactcagtgctgaaaatcacggtgaagccaaaaatgatgagaaaggtgtagaagatggagggggaagtgatggaggggatagcgaagaggaggaagaggaggaggaagagcaggaggaagaggaggaggaggaagagcaggaggaagaggaggaggaggaggaggaagaggaggagaagggaaatgaagagcctctgtccctggactggcctgaaaccaggcagaagcaggccatttacctcttccttctgcccatcgtgttcccactgtggctgacagtccccgacgtccgaaggcaggagtctaggaagttttttgttttcaccttcctgggatctatcatgtggatagccatgttctcatacctcatggtgtggtgggctcaccaggttggtgaaacaatagggatttctgaagagatcatgggcctgacaatccttgcagcaggcacatcaattcctgacctcatcaccagtgtgattgtcgctcgaaaaggcctgggagacatggctgtgtcaagctctgtgggcagtaacatatttgatatcactgtgggcttgcctgttccttggttgcttttctctcttatcaatggattacagccagttccagtcagcagcaatggcttgttttgtgcaattgttttgctttttctcatgcttctgtttgtgatctcttcaattgcgtcatgtaaatggagaatgaacaagatcctgggcttcacaatgttcctcctttactttgtattcctgataatcagtgtgatgttagaagatcgaatcatatcctgtcctgtatctgtctgaatcagtcactcttgctcacaatgggcatggatcagaagaccatgcagaagttactgtatctcttgtgaccctaatgaaagaatgtatatgatcctggaaagtgaactgggtgacctaggacctctgatatgaatgtgatctgagactaaagtttgtccttggaaacacctgcagctcattgtggattaagaacctcacccctggaggggtggagtttctacccctgactcatgcagacatctattacatggaggcagtagaaggacccctggagccagagggttttctaaatgagataactgggggcaaaggttgggataggcgcagcagctataagacaagctcctacgctcactgttccctgatcattccaaaggctgctggcccaaaagatgcagatgtggtctacatctcagccttcctgacctctgccccaaacacacgctgcaattttgtctcctccttttctgttcaaattgtgaggttctatcaggtttgtaatcactgtagcttcagttattggtgagtctaaggatccaaggctacagaaaaaaaagaaatataacaggaattaatgatcattccacgttttgtagcccactgcatctggatatataccagtattttctttttttttttttttgagacagagtttggctcttgttgcccaggctggtgtgcaatggcgtgatctcggcacaccacaaccttcacctccccggttcaagcaattctcctgcctcagcctgaagtcgtgatctgcccgcctcggcctcccaaagtgctgggattacaggcgtcagccaccgcgcctggcctataccagtattttctagtttaaaggaggactacattaactcttattgttgtgtttctgaaaagtgaaatttaaaaagcagcctgaaaaataaaaatttataatttgcccttgaattggaaggaatggagattagggaaggaaaactactctagaggccatttaaaagtatgtatttattagaacatgcaaattcatgttgtctccatcagtggtcaccttgagggattagacattctaatggaatgtcctggctccaccctccagcatgttctcacccaacaatgacagttgagtggagtgggaagggaagtcattctaaagagtccaaagtcagtagcgccacatctggtttataaagtaagagatccagtgggacaatgctatttttgtatgccaacctagataggattataaagcaagactgatttcttctgtggtttatgaatggatcttaaggtaattacaaaagggaaattccaagaatgcataacacaatgacaacatggtgagaaaagtgcagtactacttccaaggtagctagtgtaaaggacacttgagtttttaaaactgtggttaaatgttttatgtggaatttgatgagtttgtatattaaataccactgcttgctgcttttactagaatcaagttaagggacacgttagaaatagaacagcttaatatcactggcttcagagcaaaatgagctcgggtgactgcagattatgatggtaaatatggctttaattacaaacatgaggaatgattcactgaagatgaaaagataggacggatgtgatatgaaaaaaacccaaacattttggcattgaatgatggctaaggtgttccaagtattccatcttttaagatgaattgcttaattaattgcctcgctaccccaggattctcattctttggaaataatttttattaaatttcaataaactgtgaatcccaatggtattttactttacaacatggatgggctcatccttatctttaggtcatttggtcagaatcctcccgagaagactgatgaagagtatggaatcatgttccaattctatattcttaattatccttattcctgatgctactgcattgctgggtttccatagccaaggcctaagaacaggaggagaaggcaatgcttgtgggagggaggtcccaataccaaaattctgggcactaacctggtgtctgcagcccgttcccgttagcctcggggatgtcacctcacccacagcctgggatctgacgttcttcctcagactggagtaaggagtgatggaccgtaaaatgctgtgtaatgataaaaggctgaaatatccactgaatgattaaaaccaactctaataatctga

SEQ ID NO: 456 - DNA, 4199 bp, Homo sapiens
agaaaaggaggaaggagaacattgctgtagcttggatctacaacctaagaaagcaagagtgatcaatctcagctctgttaaacatcttgtttacttactgcattcagcagcttgcaaatggttaactatatgcaaaaaagtcagcatagctgtgaagtatgccgtgaattttaattgagggaaaaagggacaattgcttcaggatgctctagtatgcactctgcttgaaatattttcaatgaaatgctcagtattctatctttgaccagaggttttaactttatgaagctatgggacttgacaaaaagtgatatttgagaagaaagtacgcagtggttggtgttttcttttttttaataaaggaattgaattactttgaacacctcttccagctgtgcattacagataacgtcaggaagagtctctgctttacagaatcggatttcatcacatgacaacatgaagctgtggattcatctcttttattcatctctccttgcctgtatatctttacactcccaaactccagtgctctcatccagaggctcttgtgattctctttgcaattgtgaggaaaaagatggcacaatgctaataaattgtgaagcaaaaggtatcaagatggtatctgaaataagtgtgccaccatcacgacctttccaactaagcttattaaataacggcttgacgatgcttcacacaaatgacttttctgggcttaccaatgctatttcaatacaccttggatttaacaatattgcagatattgagataggtgcatttaatggccttggcctcctgaaacaacttcatatcaatcacaattctttagaaattcttaaagaggatactttccatggactggaaaacctggaattcctgcaagcagataacaattttatcacagtgattgaaccaagtgcctttagcaagctcaacagactcaaagtgttaattttaaatgacaatgctattgagagtcttcctccaaacatcttccgatttgttcctttaacccatctagatcttcgtggaaatcaattacaaacattgccttatgttggttttctcgaacacattggccgaatattggatcttcagttggaggacaacaaatgggcctgcaattgtgacttattgcagttaaaaacttggttggagaacatgcctccacagtctataattggtgatgttgtctgcaacagccctccattttttaaaggaagtatactcagtagactaaagaaggaatctatttgccctactccaccagtgtatgaagaacatgaggatccttcaggatcattacatctggcagcaacatcttcaataaatgatagtcgcatgtcaactaagaccacgtccattctaaaactacccaccaaagcaccaggtttgataccttatattacaaagccatccactcaacttccaggaccttactgccctattccttgtaactgcaaagtcctatccccatcaggacttctaatacattgtcaggagcgcaacattgaaagcttatcagatctgagacctcctccgcaaaatcctagaaagctcattctagcgggaaatattattcacagtttaatgaagtctgatctagtggaatatttcactttggaaatgcttcacttgggaaacaatcgtattgaagttcttgaagaaggatcgtttatgaacctaacgagattacaaaaactctatctaaatggtaaccacctgaccaaattaagtaaaggcatgttccttggtctccataatcttgaatacttatatcttgaatacaatgccattaaggaaatactgccaggaacctttaatccaatgcctaaacttaaagtcctgtatttaaataacaacctcctccaagttttaccaccacatattttttcaggggttcctctaactaaggtaaatcttaaaacaaaccagtttacccatctacctgtaagtaatattttggatgatcttgatttgctaacccagattgaccttgaggataacccctgggactgctcctgtgacctggttggactgcagcaatggatacaaaagttaagcaagaacacagtgacagatgacatcctctgcacttcccccgggcatctcgacaaaaaggaattgaaagccctaaatagtgaaattctctgtccaggtttagtaaataacccatccatgccaacacagactagttaccttatggtcaccactcctgcaacaacaacaaatacggctgatactattttacgatctcttacggacgctgtgccactgtctgttctaatattgggacttctgattatgttcatcactattgttttctgtgctgcagggatagtggttcttgttcttcaccgcaggagaagatacaaaaagaaacaagtagatgagcaaatgagagacaacagtcctgtgcatcttcagtacagcatgtatggccataaaaccactcatcacactactgaaagaccctctgcctcactctatgaacagcacatggtgagccccatggttcatgtctatagaagtccatcctttggtccaaagcatctggaagaggaagaagagaggaatgagaaagaaggaagtgatgcaaaacatctccaaagaagtcttttggaacaggaaaatcattcaccactcacagggtcaaatatgaaatacaaaaccacgaaccaatcaacagaatttttatccttccaagatgccagctcattgtacagaaacattttagaaaaagaaagggaacttcagcaactgggaatcacagaatacctaaggaaaaacattgctcagctccagcctgatatggaggcacattatcctggagcccacgaagagctgaagttaatggaaacattaatgtactcacgtccaaggaaggtattagtggaacagacaaaaaatgagtattttgaacttaaagctaatttacatgctgaacctgactatttagaagtcctggagcagcaaacatagatggagagtttgagggctttcgcagaaatgctgtgattctgttttaagtccataccttgtaaataagtgccttacgtgagtgtgtcatcaatcagaacctaagcacagcagtaaactatggggaaaaaaaaagaagaagaaaaagaaactcagggatcactgggagaagccatggcattatcttcaggcaatttagtctgtcccaaataaaataaatccttgcatgtaaatcattcaaggattatagtaatatttcatatactgaaaagtgtctcataggagtcctcttgcacatctaaaaaggctgaacatttaagtatcccgaattttcttgaattgctttccctatagattaattacaattggatttcatcatttaaaaaccatacttgtatatgtagttataatatgtaaggaatacattgtttataaccagtatgtacttcaaaaatgtgtattgtcaaacatacctaactttcttgcaataaatgcaaaagaaactggaacttgacaattataaatagtaatagtgaagaaaaaatagaaaggttgcaattatataggccatgggtggctcaaaactttgaacatttgagcttaaacaaatgccactctcatgcattctaaattaaaaagttaaaatgattaatagttcaggtggaagaaataagcatactttttgggttttctacacattttgtgtagacaattttaatgtcagtgctgctgtgaactaaagtatgtcatttatgctcaaagtttaattcttcttcttgggatattttaaaaatgctactgagattctgctgtaaatatgactagagaatatattgggtttgctttatttcataggcttaattctttgtaaatctgaatgaccataatagaaatacatttcttgtggcaagtaattcacagttgtaaagtaaataggaaaaattattttatttttattgatgtacattgatagatgccataaatcagtagcaaaaggcacttctaaaggtaagtggtttaagttgcctcaagagagggacaatgtagctttattttacaagaaggcatagttagatttctatgaaatatttattctgtacagttttatatagttttggttcacaaaagtaattattcttgggtgcctttcaagaaaattaaaaatactactcactacaataaaactaaaatgaaaactcaaaaaaaaaaaaaaaaaa

SEQ ID NO: 457 - DNA, 5741 bp, Homo sapiens
gcgggctggagccggggctggagtcgtaactcggaagccggagcccagacgggcccgcggcgggggggtgggggctgcgcgggggcgggagtggcggaggtggccgcccctggcggcgggtttgtttatcccggggaagaagtttaggagcgggagatagggaaggagggcgggtcggggaggagggatgcggttcggcggaggcggccgccacagggacttgccgccatcacccctgctgccaccaccgcagcctcgggctcccagggcggacacggccaccgcctcagcgggagaggagtctccaccaggactgaccgctgccgcccagcacgtccaggtaaggtactcaactgtgtggggtactacataaatcctgaaagactacaataaagtggtgatgtctcgggaacccaccccacctctacctggagatatgtctactggtcccatagcagaaagctggtgttacacacaggttaaagtagtaaaattttcctatatgtggaccattaataacttcagtttttgtcgagaggaaatgggtgaagtgttaaaaagttcaacattttcatctggcccaagtgacaaaatgaaatggtgcctgagggtaaacccaaagggattagatgatgaaagtaaagactacttgtccttatatttgcttttagtcagctgccccaaaagtgaagttcgagcaaaattcaaattttcccttctgaatgctaaaagggaagaaacaaaagcaatggaaagccaaagagcatatcgatttgtgcaagggaaggactggggttttaaaaaattcattagaagggactttttgcttgatgaagctaatggtcttttaccagatgacaagcttacattattttgtgaggtgagtgtggtccaagattcagtaaacatatcaggacatactaatacaaatactttgaaggtgcctgagtgtcgtctagcagaagatttaggtaatctctgggaaaacacaagatttacagactgcagttttttcgtgagaggacaagaatttaaagctcataaatctgtgcttgcagctcgatctccagtttttaacgccatgtttgaacatgaaatggaagaaagcaaaaagaatcgagtggaaataaatgatttagaccctgaagtttttaaagaaatgatgagattcatttacacagggagagcaccaaaccttgacaaaatggctgacaacttgttggcagctgcagacaaatatgcactggaacggctgaaggtcatgtgcgaagaagctttgtgtagtaacctctcagtagagaatgttgcagatacccttgtccttgcagatttgcacagtgcagaacagttgaaagcacaagccatagactttattaataggtgcagtgtacttcgacaacttgggtgtaaagatgggaaaaactggaacagcaaccaagcaaccgacataatggaaacatcagggtggaagtccatgattcagtctcaccctcatttagtagcagaagcctttcgagcactagcatctgcacagtgtccacagtttggcattccacgcaaacggctaaaacagtcctgaaatcttccatgaacagttgaaaaatggaattgactttcactcctccaggtccagaaggattctaatacacaaaccataagcaagagttgtttctgttattttgtccacagaacagaagctgaaaaagcatattgcttgcatttcaggtggataatttatggtttattcttcagctttaaattagactgattaattcacttcaaggccttaaattatcttcaatgacttctcttgttcatataatactttaatttttttttattgtgccttgtcattttgaccaaggctatgcaggattgcactagctccataatgcagtaatattgataactgaagatactaagtttcaaaaggatcttccattattttgcaaaaagaaaaatgaattttatagggtttgtcctatgctatctcaaagtttaagttctctttaaaagcacttgtattggagattaccagtaatatctccaatctaagttctataaatatgggagaaccctcttaccttcaaggtaagttatggcaatacactgcttcaattctaatttatttttcatttcagggggcaaatatgcaatgagttggcctagatttttagtgacatttatgatgtttgtcttgtatgttaactgtccaacaaactgtgggtttattctaagtttacaattattgagaactgattgaggttaagatttcatgaagaaagcatgtattgtgtggaagtaatttttttttaatttatactgacctacatttatacgaagaattctgtacatgttaaaagtaaggatgaccaaatgcaaatttaatgagtgggccaattaagaaagatacatatgcacttttactgtgtaacttttgtatgctgaatggtacatatatttttttgcttttgagggaattaataaggtataattaattgtgtcttaacttttcaaagaaatttttagatggaggcaactgggatgtttgtgataatagatgagaaagacatccttgattgtagttaaattggtttggattacagatattcattattgaattgactcctattttctcacactttggaaaagacacctgaacaataaatgaatcctggatagtctactctccttcaaacaattaactgatacttgcctttgggagatgcatacaaaaggagagaacccttagactatgtcaggtcacactaggaacctcccctcactccccgtttttcttcattgtgtttcagttactgtactaacattgtggatgatactgaaattctgcataatgtgaacaggataaactatttataaactgcttttcatgggccagttctttattataaatgaattttagctttaaatgcatatacacgttcagtgtttgatagttgtgttcttaagggaggtttgttctggtgcattgtcctggagaagcagaagcagtcagtgttggggtaccacatctgacttactgtggtggtgaccagtgtgcttcttaagggcaagatttatatttgaccacaagggaaaaagtgtgtcactggaaaaaaacgcatatacctatgtttgcaaacataactattcttcagattaaaatttgtataatttgtttatttaatgtttgaattcaggacaaaagaaaaaatgaagcttgaggtgttttcaaatagaccttatttttgctatctctttgttaggtgttaactgaagcaattcgaatatgtccagattcatttggattcatatttacattgaaaaaactcaactaagcatttgttatccacaacaacctagagtttaaaaagatcgtattttcacctgtcttcattactttctatgtagtttcattctttgtcgtggtaacttaaatttgaaattggaagaatctcttgggatagaagaaagattcttacctggtgatggaacttcatacttcatcctgtgtaagagtattatgggaagtagaaattcacttccttaaatccatcgtaagattgagcctcaagtttgcaatatacaattttaaaaatacacatacatacatacatatgtatacatttccagttttaagattttgcgagggtcttataagaaaacaaaaattccctcaggctatagaattatgttgtcatatatcagaaaagtactgatgtatccatttatatccaatgcgcaccacaccggcacattgtgatttaattcaccgcttgaatctatatttctaaccacagtgacttcagtaaaaataccgtataatgaacatttcagcttcttcttacttactcgagagtttattgcaaatcttaaggattttattataaagattttttttttagtttggtagcacattttgtaccaaaaatgtcaaacactgtgctgtaagaatatccatgtttgtagaaatgtccacttttcagataatataatgcctaccattatactaacagaatcatatggtagttgatttatttttttatttattatgtatatttttggtattgtgggttcttgaggcaatgataaaaacacttaatgtattctgacatgagtgctctaatagcctccttctcctcatttttaaactgcatacattactttcaaaataggtatagatattctgtcccgccttttgagctattagcctgttcctgtttccctttgtcacctaagcaaggctttttctgagaaggtagtgaatggtttcaaatgttgcatactataagaataatcattgggtaactgttgtttagaccaacacttagaaatactatatttgtgccttttcatttttaattttaatgtgtgttgatatttggagcacaaataatgaaggtgccataatatggcttgccaatgttacctccttgaatagtcatgtgtcattgtcttgaattggtaattggagaaccttgcatgaaatatgtgatcgtgtgtgtgtgtgtgtatgcgcgtgtgtgtctgtgtgtttgtgtacatacctgtatttgcttggggcttgtgtgtggtatgttacaaagagtgaatttctggaaatagaaatcagttaaatgttgaaagttcaggttagcagaaatatttcatttaaatatgctttactttggaggacaattgattaacagaggaaatgataattttcaaaaatgtgatcaatttactgcatgatgaaatgtgaaaacagtgcctttttaggacatcaattataataaaattgttttaaaatattaacaaagatctcaaaaagttgtcatgaacattattcatttatttttaaactggatctaaataagagcttagatggccaaaattagaattaataatatacccatttaaattttgttcataaatttaaaatcttaatcagaattctttataaaatgtgggtcatagatatgacccagtgttactaaaatagaacagggattgtgaaaatccagctcaacatacttaagtatacttggcttagagccaagtatacttgaagaggtgaattattctgacttggacatgcatgctctttgatggataaaataaaaatattcaatttattcttacaaaagaaggtgggtgggtgagtgggttcgttttagtgttctcagattataaagacagctataaagacagcactttccgcacacaaagtgtattttacaaaccttttttatacaaattaatgagctctactttatttaagtgttcatggaatgatgtaaattttaggtccagttgaacaaatattgagtgcctatcatatgcaagactaactccttactaggaatgaaatcacacagtgtcttctgtttgcagtatgtgaactttatgtttgaaaagaaattattatatttaaatttttttgttgtcagagtttatcattgtatactgtaacccagtaaattttgcattcagttttaaaaaatgaagatgtaacttacctgagtctcatttttgaaaatgaaattctgcaaaaattatttaaaaattagttcttggggaaattgattttcaagattcaagtgtataaaaacttatattgaacttttcagcctcgtttttaattagctgatgttaatgataagatacataatacatgtatcttgttgctgaaaatattttttgcatttcaacacattgagttaaaataaagttgttactacttattcaagattaaaaaaaaa

SEQ ID NO: 458 - DNA, 3717 bp, Homo sapiens
aaaaacttccggcgggaaccggaaggtgcggtggcactcacggaatctcgggtcttctgacgtgccgggcgggaagatgtcatcattgccaagaagagcgaaagtacaggtccaggatgtggtactgaaagatgaattttcttcattctctgagttatcatctgcctctgaagaagatgacaaggaagatagtgcctgggagccccaaaagaaagttcccagaagccgtaaacagccccctcccaaggaatccaaaccaaagaggatgcctcgggtgaagaagaatgccccacagatcagtgatggctcagaagtcgttgttgttaaggaggagctgaatagctctgtggctattgctgatactgctttagaagacagaaaaaataaattggatactgtacagactctgaaaacagccaagacaaaacagaaatgtgcagcgcagccacatacagttcgaaggactaaaaagctgaaagttgaagaagaaaccagcaaagccagcaacttagagggtgagagtaatagttcagagacaccatccacaagcactgtgtggggaggtacatgcaagaaggaagagaatgacgatgactttacatttggtcagtccgctttaaagaaaatcaagactgagacatatcctcaggggcagcctgtcaagtttccagcaaatgccaatagtactaaagaggaggtggaaatgaattgggacatggtacaggttttatctgagagaactaatattgaaccttgggtttgtgccaacatcattcgtctctttaatgatgataacacaattcccttcattatacgttatagaaaagagctcattaataaccttgatgctgattccttgagagaagttcagcaaaccctagaagagctacgggctgttgcaaagaaagttcatagtacaatccagaaaattaagaaggaagggaagatgtctgagtgcttgttaaaagccatgctgaattgtaaaacttttgaagaactagaacacgtgtctgctccatataaaactggaagcaaagggactaaagcccagagagcaagacagttgggcttagaaggagcagccagggcactgcttgagaaaccaggggagctcagtctgctatcgtacattaggcctgacgttaaagggctttcaacgcttcaggatattgaaataggagtgcagcatattttagcagatatgattgctaaagacaaagacacgcttgacttcattcggaacttgtgccagaagagacatgtttgtatccagtcatctctggcaaaagtatcctcaaaaaaggtaaatgagaaagatgttgataagtttctgctctaccagcatttttcctgcaacataagaaacattcaccatcatcagattctggcaattaaccgtggagaaaatttgaaggtactgacggttaaggtcaatatttctgatggagtgaaggatgaattctgtaggtggtgcatccaaaacaggtggagaccacgtagctttgcaaggccagagttaatgaagatcttatataattcactgaatgattcctttaaacgccttatttatcctcttctctgtagagaattcagagccaaactaacatcagatgcagagaaggaatcagtaatgatgtttggacggaaccttcgtcagctccttttaacaagccctgttccagggcgcaccttaatgggagtggatcctggttataaacatggttgcaaattagctataatttctcctactagtcagatacttcatactgatgtggtttacttgcattgtggacaaggcttccgagaggcggagaaaataaagacacttttgctgaatttcaactgcagcacagtagtgattggaaatggaactgcctgcagggaaacagaagcttactttgctgacctgataatgaagaattattttgcaccactggatgttgtttactgtatcgtcagtgaagcaggagcatcaatctacagtgtcagccctgaagctaacaaagagatgccagggctggaccctaatttgagaagtgcagtttccatagcaaggcgtgtacaagatccattagctgagctagtgaaaattgagccaaagcacattggagttggaatgtatcagcatgacgtatcccagactttactcaaggcaacactggacagtgttgtagaagaatgtgtcagctttgtgggagtggatattaacatctgttcagaagttttgttaaggcatattgcaggactcaatgccaacagggccaaaaatattattgaatggcgagagaaaaatggaccctttatcaaccgagaacagctgaagaaagtgaaagggctgggcccaaaatccttccaacagtgtgctggcttcatcagaatcaaccaggattatatccgaacgttttgcagtcagcaaactgaaacttcaggccaaattcaaggagttgctgtgacatcttcagcagacgttgaggtcacaaatgagaagcagggcaaaaagaagagcaaaactgcagtgaatgttttactgaagccaaatcctttggaccaaacttgtattcatccagaatcatatgacatagcaatgaggtttttgtcatccattggagggacactgtatgaggttggaaagcctgaaatgcaacaaaaaataaattcattccttgaaaaggaaggaatggagaaaattgcagaaagattgcaaacaacagtacacaccttacaggtcatcatagatggtctcagccagcctgaaagctttgactttcgaacagattttgataaacctgatttcaagagaagcatagtatgcctggaagatctgcagattgggacagttcttacaggcaaagttgagaatgccactctctttggaatttttgtggatataggagtggggaaatctgggctgattcccatacgaaatgtaacagaagcaaaactttcaaaaacaaagaagagaagaagccttggactgggccccggagaaagagtggaagtccaagtactcaacattgacatcccccgatctaggattactctggacctcattcgggtgttatgagtatcccacgaaggccagacgctgattttattttctcatttccacagattgacaaggataagtcagttgtttgtaaactctaggtagcagatgagaaataattcacttaatatcagaaatattttccaaacactttcctttattttttcttctgaataaatagaaaaccaacagtttgatttccttttcccttaaaggaaacaactaatacacattcttatatggctttatgtagtaatagttttctgactaaaattttgttttttattttttgtaatttatctttaactccttttgcattttgtataacagattgcttaacttctacttgccaacatctgccttgctggacttgtatgggattgtcttcttgatttgaattgtaccgtctttgttgacacagtagggctgggcagtgtttaatccttccattttatagatttttttttaatcaggccttttggacttcattcataattttgcaataatctcttttcccttgtcatgcaagccaaaaatataccagtaaaacagattctgacgtgtttgtagttatcaaatgaatggctcgaaacacttctcaaaaggatatacgtattgaccccaacaataaatgtttgtggctagtgaaaaaaaaaaaaaaaaaaaaaaaa

SEQ ID NO: 459 - DNA, 4230 bp, Homo sapiens
gaagggtcgggggatccctccgccgccagcgcgtggtcccggccccctccacccgccgtctcggccgcggccagcagcccctgccccccgggggacgctgacggccgcccggcgcgccgccctagcagacggacagggggcgctgcgcgcggcctggggcaacccgggccacaggggcaggaaagtgagggcccaggtcggcccgggcgtgcaggggccccgggttcgcagcggcggccgcggcagcgatagcggcactagcagcagcgggagtgccgggttgagccgggaagccgatggcggcggctgcggcggctccgattcctcgctgactgcccgtccgccctcctgcatcgagcgccatgttaccgacccaagctggggccgcggcggctctgggccggggctcggccctggggggcagcctgaaccggaccccgacggggcggccgggcggcggcggcgggacacgcggggctaacgggggccgggtccccgggaatggcgcggggctcgggcccggccgcctggagcgggaggctgcggcagcggcggcaaccaccccggcgcccaccgcgggggccctctacagcggcagcgagggcgactcggagtcgggcgaggaggaggagctgggcgccgagcggcgcggcctgaagcggagcctgagcgagatggagatcggtatggtggtcggtgggcccgaggcgtcggcagcggccaccgggggctacgggccggtgagcggcgcggtgagcggggccaagccgggtaagaagacccggggccgcgtgaagatcaagatggagttcatcgacaacaagctgcggcgctacacgaccttcagcaagaggaagacgggcatcatgaagaaggcctatgagctgtccacgctgacagggacacaggtgctgttgctggtggccagtgagacaggccatgtgtatacctttgccacccgaaaactgcagcccatgatcaccagtgagaccggcaaggcactgattcagacctgcctcaactcgccagactctccaccccgttcagaccccacaacagaccagagaatgagtgccactggctttgaagagacagatctcacctaccaggtgtcggagtctgacagcagtggggagaccaaggacacactgaagccggcgttcacagtcaccaacctgccgggtacaacctccaccatccaaacagcacctagcacctctaccaccatgcaagtcagcagcggcccctcctttcccatcaccaactacctggcaccagtgtctgctagtgtcagccccagtgctgtcagcagtgccaatgggactgtgctgaagagtacaggcagcggccctgtctcctctgggggccttatgcagctgcctaccagcttcaccctcatgcctggtggggcagtggcccagcaggtcccagtgcaggccattcaagtgcaccaggccccacagcaagcgtctccctcccgtgacagcagcacagacctcacgcagacctcctccagcgggacagtgacgctgcccgccaccatcatgacgtcatccgtgcccacaactgtgggtggccacatgatgtaccctagcccgcatgcggtgatgtatgcccccacctcgggcctgggtgatggcagcctcaccgtgctgaatgccttctcccaggcaccatccaccatgcaggtgtcacacagccaggtccaggagccaggtggcgtcccccaggtgttcctgacagcatcatctgggacagtgcagatccctgtttcagcagttcagctccaccagatggctgtgatagggcagcaggccgggagcagcagcaacctcaccgagctacaggtggtgaacctggacaccgcccacagcaccaagagtgaatgatccgcccgccgccctggacagatggcccaagggatggcaccacttatttattgttgccttttcacgttttctttacacacacgttgacgggccgcaggagggaggcggggaggaggaacgggcagccacaggactgagccctctcactccagccaaagaaatgggcctgcctgcctccacccgtcctccctcagcctccccttcttcccgccccacctcccatttctgttgctggaggggctgtcctccttcctgggaccccctcgccagcttggctcgatgtttgccatgagtattagcttacccaatgggaccgtgccccacctccccacacacaggccttctgtggggctgggcaccgtgtcctcctctgaggaagcagttggggccctcttgccagcctccttgctgaccccaggtcagccctgtgtctgtcacaggctgggtcaaaagagccctggctctgcccctcagggggccagctggggagatgggggcttcttcctcacactgctgtcctctcccccttcagctcctgagtagctgggcctgtgcactgggcaggttcctggggccgcctgccctgccttgccgctccccttggacctccaggggctcctgggttggagggaaccaccagcgttcccttctcccccttgtcttcccccctctcctcccagctgctttacttaaagttgattttgaactttttatttgaggagacgaagtgaaaacaaatctataaatatatatttttaaaatatttaacttttttttatggcgtttttctcgtccccctccctgcccaaactccccttccctggggagccctcaggctccccagaactggctgggcccctggggacagagccaccccatgagctcggggtccaccagtgtgtgggggagattctgggtttgcccagtcctgggttgtttccaggagaaagccgggggaggggccctcaggccattccccaacggggtggggagggtgacccacagctctgggcctctttttgccctttagggctgttgctagggagagggaagagggagaccaaatgtcggggttggggtgggagggcgtcaggcagaggcaactgacttcatttgtgccacacgcatgggcattgcagccttgcgctgtcccaggcatgcagctgcctggggcccaagttgcagtgagcagggtggggtctgggagggggtgagaggcaggaatgggggtcagaagaagtgggagcagcttcttgggctgagtgcagccaaaggggagccagaaatgggcagttctcccagggagtgagcagctactgtaacttttttaaattaagacaaaaagccttgaagaaaatgactttatttttctaagtgtaacctcagtatttatgtaatttgtacaggggccatgccccacccccctcctccccctttggggtagaccttgagggtgggccagcataggggggagggtcttttaccctgtgtcagagcctaccttcaccacctatatccagaaggggagctttttcagaaacagggcagcagtggggtgaaattttcttaacccctaagactgccttcagtaggaacaagctggcttctgtgattaggtgaagggatgggggaagattttatgcacagcctagttatcaaggggatgatttgccgacatgtttgagaaccccctaacctctaaccctcattgctgtcttgccccagtttggggtgccaagatggaagtcacctttctgggctttctcctggagatagctggggcttatgggtggctttcaaggctggggcatggcaaatcaggggccagagagcaggggagcttgggactcaggtctgtaactgcccagccccttttctctgctcttgtttcactccaccatcactcactcactccccactcccccacccatggggaggagacctttgatgaattcttcctctccttcccacaaaagacagacccagtgagtgaatcaggcaaagtgcttataatgtgtgttgtgtgagcgtggccttgggaggacatgcgtgtgtcagggatgagttgaggtgatatttttatgtgcagcgacccttggtgtttcccttcctcggtggctctggggtatgtgtgtgtgggtgtgtgcgcctgagtgagtgtgtgtgcttgaatgtgagtgtgtatgtcagtggtttctacttcccctgggatgctgacccaggaatagtggacatggtcacagtcctatgtacagagctttcttttgtattaaaaaaaaatactctttcaataaatgtatcatttttgtgcacagaaaaaaaaaaaaaaaaaaaaaaaaaa

SEQ ID NO: 460 - DNA, 8475 bp, Homo sapiens
gttgtgaccactgaacaaaacttgcccattgaaagcaaacccggaacagctggataatgtccaccccgagccgattcaagaaggacaaagagatcatagccgagtatgaaagtcaagtcaaagaaattcgagctcaactggtagaacaacaaaaatgcctggagcagcaaacggagatgcgagttcagcttctccaggatctgcaagatttcttccgaaaaaaagctgaaattgagacggaatattcccggaatctagagaagttagcagaaaggttcatggcaaaaacaagaagcactaaggatcatcaacaatacaagaaagaccagaacctgttgtctccagtgaactgctggtatttgctcctgaaccaagtaaggagagaaagcaaagaccatgcaaccttgagtgacatctatctgaacaatgtgattatgcggttcatgcagataagtgaggattctaccaggatgtttaaaaagagcaaagagattgcattccaacttcatgaggatttaatgaaggttcttaatgagctttatacggtgatgaaaacataccatatgtatcatgcagagagcatcagtgcagagagcaagctgaaagaggccgaaaaacaagaggaaaagcaaattgggagatctggtgatccagtcttccatattcgactagaggagagacatcaacggcgaagctctgtaaagaaaattgaaaaaatgaaagaaaaaagacaagcaaaatattcagaaaataagctaaaatcaattaaggcacggaacgaatatctcctaacacttgaagccaccaatgcctcagttttcaagtactatattcatgatctttctgatttaattgattgctgtgatcttggctaccatgcaagtctgaacagagccctaagaacatatctgtctgcggagtacaaccttgaaacctccagacatgagggcttagacattattgagaatgcagttgataatttagagcccaggagcgataagcagagattcatggagatgtaccctgctgcgttctgtccaccaatgaagtttgagtttcagtctcacatgggtgatgaggtgtgccaggtcagtgcccagcagccagtccaggcagagctcatgctcaggtaccaacagttgcagtcccgccttgccacgctcaaaatcgagaatgaagaggttaagaaaacgactgaagccaccttgcagacgatacaagatatggtcaccatcgaggactatgatgtttctgaatgcttccagcacagtcgttccacagaatcagtgaagtccactgtctctgaaacctacctgagtaaacccagcatcgccaagagaagagccaaccagcaggaaactgaacagttctacttcatgaaactcagagaatatttggaaggcagtaatctcatcacaaaacttcaagccaaacatgacttgctgcagaggaccctgggagaaggtcatagagctgaatatatgactacaaggcctccaaatgttccccctaagccccagaaacacaggaagtccaggccccgctcacagtataatactaagttgtttaatggggatttggaaacattcgtcaaggactcaggacaggttattcccctcattgtggaaagctgtattcggttcatcaatctctatggtcttcagcatcaggggattttcagagtgtctggttcccaggtggaagtcaatgatattaaaaattcatttgagagaggtgaaaatcctttggctgatgaccagagtaaccatgatattaactcagttgctggcgttctgaagctctatttccgtgggctggaaaaccccctctttcctaaggaaagatttaacgatctgatttcttgtatcagaatagataatctctatgagagggcgcttcacatccgcaaactcctcctgactttgcccaggtcggtccttatagtgatgaggtacctctttgccttcctcaatcatctatcacagtacagcgatgagaatatgatggacccttataacctggccatttgctttggcccaacattgatgcctgtcccagaaatacaggatcaagtgtcttgccaggcacatgtgaatgaaattatcaaaaccatcatcatccaccatgagactattttcccagatgctaaagagctggatggccctgtttatgagaaatgtatggctggagatgactattgcgacagcccatacagtgagcacggtacattggaggaagtggaccaagatgctggtacagagccccacacaagtgaagatgaatgtgagccaatagaagcaatagccaagtttgactatgttgggcggtctgccagagaactatccttcaagaagggtgcctccctgctgctgtatcaccgtgcatctgaggactggtgggaaggcaggcacaacgggattgacgggctggtgcctcaccagtatatagtggtgcaggatatggatgatacgttttcagacactctgagccaaaaagccgacagtgaggccagcagtgggccagtcacggaagacaagtcctcatccaaggacatgaactccccgacagaccgtcatcctgacggctatttagccaggcaacgaaaaagaggagagccaccccctccagtaaggcgtcctggcaggaccagtgatggccattgcccgctccaccctccacatgccctttctaactcctcagttgacctagggtccccaagccttgccagtcacccccggggcctgctgcagaaccgtggcctcaacaatgacagtcctgagcggaggcgcaggcctggccatggcagcctgaccaacatcagccggcacgactccctcaagaagatcgacagccctcccattagaaggtccacgtcatcagggcaatacacgggcttcaatgaccacaagccactggacccagagacaattgctcaggatattgaagaaacgatgaacacagctttgaatgaactccgagaactggagagacagagcacagcaaagcatgcccctgatgtggtgctggataccctggagcaagtgaaaaactctcccacccctgccacttccacggaatctctcagccctttgcacaacgttgccctcaggagctccgagcctcagattcgacgtagcacgagctcctccagtgacacaatgagtactttcaagcctatggtggcacccagaatgggcgtgcagctgaagcctccagcccttaggccaaaacctgctgttcttccaaaaacaaatcctaccataggacctgccccacctccccagggtccaacagacaagtcatgcacaatgtaaaaaccagccaagcaaggccataaagggaggtgacttaaaaaagaaaatggattagtgacaaaagtcactgatccataactttccttagttttgtgcttataactggagatcttttggcttttctatgttgtcgaatgtaatgtctgagactagctaaattaacacgggcatttgtattttgtaatttttttaaataactggacatatgtcattttaaggacaatagaaacacttagacttacttgaaaatccaatgctgcaccacttgtaatgaaggcaacaccgctctccacattgtacagagcttcaggtttaatgtagcccagctgagtcagaaaggttgtgacctgaaggcagaagaacccgaatgccacacctcattggagtatagccagtgttggtctgtggcacttgggctgaaaggtgataatggcattgcgtggtagctgacaatgagcaccttcggttccatgtggagcggggtttagctcatgcaaaagacttgcaattgtctccatgggacgatcccagtgggactgtcagcccacagctcgagtgggttggatgcttgcctctttcctaacagttatttccccgggtccagcttaaagactcgatggaaggaggtagaacctctgctgttactgcttgaacttaacctgggaaaggagaggaagacaccatctccaaagctattaatgtcactccttttgcgagcatgattaggccccggagatttccaagtccccccatctacacttacaaacgattagaagggtttaattttaaagactttctggttacactactccacgaactcctccaaagatccgttattcaataactgcctagaaaatgtttccatctcctctaaatccctgtgttctcctctgtggaaatgaaggcagcaagaagcacctgaggccttggttcatgcagtgttctcttttgactaaatcacctaggttcctttaaacatgctacaaagcccaggcatggtggtgcacacctgtactcccagctactcgggtggtttacacaggaggatggctttgggcctagtagttcgagtccagcctgggcagcatagtgtgagaccctgtctcttaaaaaaaaaaaaaatgctacaaagtcctgatgatcctaaatttgaaatcccaactgtcctctccatttgtctttgagccaaccctgaactggccctggtacctgagtaagagccatgcagggccatcagcagaacatggccttgtggttctcacccagttgtgtacctcacaaccacaacttctttttctttgtcccttttcccctttttggttttggttttgtatgtgggctctatgtaactcccatagtcagctgaactctcaattggagaccctctttctctggcatcctagcacacaggcaattttttaagcctatatttatgctacattttcccccatcttaagaaaatttgctttgatttccattctcctactagcagcagctgatatcacctgtagacctatgagcattttatctattctatcattgaagttactgataaagatttttgttgttgttgttgttgttgggagaaatggatttcccacaactaatccctctggcccaccattaatttccttcttggtttcatttcaaactggcagccaattgcacgcccatctaagagctacacagtgtagattttacttcatcagcccattggtgaatgcatcgtgcagaaaagaactgggatctgtactaaaatcaagatcattactttgatctctacctcagtttgccagtgtagtcattctattgcaggaagagattaaattgatgagatattgttactttcagagtcacactgctgattgcttgcctggggcctaatttcacaaatgaatagtgacttttttcccatgtatttctaggtatggtaaacttttaaacctccaaattttcagagccatactttttgcccattttgaaaaagaagcccaggacagcaccttgtctagcccctccccatttctcctgagcttttggggtccttcagcacccttggacaccgtggagatccagccaagactgagctttgaatagcactagcccttttaaacaatcctcacaaattccttaggaatttaaactttccaaaataatcccccacttttttttttttttttttttttttttgagttggagtcttgctctgtcgcccaggccagagtacagtggtgcaatctcggctccctgcaacctccatctcccgggttcaagcaattctcctgagtagctgggattacaggcgccaccaccacgcccagctaatttttgtatttttagtagagatggggtgtcaccatgttggccaggctggtctcaaactcctgacctcaggtgacccaccagcctcagcctcccaaagtgctgggattacagatgtgagccaccatgcccggccattccaccacttctttaaaatagtaagaattcttaaaaaccatattccttgtttgatggaagagtaagatgttaacagagggcatcaaagggccagaggtgtctttgaatttattttttttcaatgtcttttctgagcttcagccttagcttttcagatcttcctcctacctgttcatttattcagccttctatctggtcatcctccccagcggctcctctctctgatgtgtccacctacggtggaacgaggattgcctttctgtgctccccatcaggactttgctgtcttggccggcaggagtcgtgctgctgcagagcctcacaggctgtgccttgtttcaggaaacagctcctaatactctcccatcactcactttacctgtctccatcttatttccctatactcctattgtcagcttgagactttttttttttttcaattccaaatgaagggtatgacctcagagtgagtgaggactcagtaaagactcacctctccttacttggtttattaaatgtcttcagattccagagataagacaaggtggccacttcacaaagaatccagaatcatgctcagtaaagctcattaaaagccactgcagctgagaaggttcacagcccttctttatagccacagaggcagcacacaggggaggtgggaagacacagggaaacgagagaagaaggataatgaggccttgaggtgttctgcccccaatttcaaggagcttatcaggcttcatgtgcaatttggggaggggagctttttgatggtgggtaaataatggctctacaaagattacctgactccactgacacaagaatatgtattctcagctgatataactgtgtgttcacatcccatccatagaactcactgaaggagattcatcaagtcagccttttggactgggttggggtttggggagtggatttggggatagagagaaaggtgtacttagtacacattttctaatgggcgttacgtgaactgtttgaacctgctgagtggcgctttgtagagctccatgttcacgttcagtgtcaacaccattcaacagctttgcacatcttcgtacaacataatctggctttggtgccccttgagccacctgtagaataatttatagcagggtcccacaatctactgcaatgatcgtgaacagttatcagtggatatagtgctccaagagtcaaattgtatccgttaagggttttctaacttttgctatcccccccgcgaccaaaaaaagggggggtttataatttaaagaaaaggaaaagaggcgtgggttggtagttgtgtccttaacatttaggaatgacatagcctctggagtctacaaactgaagaaactttcatctgatcagccttggaaatccaaagttaaagagcctatgtgtctcttgaggcgggggttagaggattcaaatttgggatgatgctcattgattcctgaccatagcagtgagaggccattttttgtgcaggaaatgtgcttaggactcagtcttgttttcgattatccaccacagaaaccctgagacacagagcagcttagaagtctctacccaggcgtaaatagagctccctactccagaccacctgccacccacctcccaagttgagaacacaagctccagctgggctggagagtcaggcttggtgcagggtgactttggcgaagttttgtcagatccataaagcaaactggaatttgagctttcacttaccctagtatacgttcttaaaaaaaaaaaaaagtctatgtggtataatcgagatggatacctgtgtctttaaattacgtagggaattttgtatgtttaaataattgtactgggttccataatgcttatcttagaaactttagtaaaagaaaatatatgaaccgtgcatttgtgaatgccccccttagagcattcatccaagttcagtgtgtagtgtgatggttattatagatatttaaagtatagtaagtggctgtgtaacaggagagactgctgtttacctacgtactgaagggtaactgctgcccgcgtaattaaatcagtattgtcctttcctgtcggtttgatcaattgcggtaccggtagcttcctgcttgtgactgttacctaattgtgtcaatgtacatctgtagtatgtacatgtgaaagtgcctttctattttagaggagttttagccttgctcttgtaccgttgccccgctctgtgccccacccccacctcctcctcccaattcctgctgcccactcgagtgtttcgaagcttcctccctgtcccccaccttccccatccccgccttcctgtgcctcggtgctcagtaatgtcccatctcacctccctgtcggtcctcagactgtctcgttttccttgtagacgtgattgtgcctttctcacccctgtgtcctcccatcccaccgcatcagtcccccgctcatgtgctgctgacagcatcgcattcgcccgtgctctgtactgcctctcaccatttcattccctcctctctgaggtgaaaataaagggggatgcttttacagtctggaaagaaaaaaaatgttttgttaatctgttgtgacaatgcacttttatgtatagtactgtacatttttggcatgtaccattacaggcttcagtatacagtcaggtttgttcttcacggtgtatctttataataaataagatagttctggc

SEQ ID NO: 461 - DNA, 2501 bp, Homo sapiens
gccgctgcgtccccactatggcggcgcccatgcagcccagcgcgttgtgggctcccgccggggtcccccgcggctgtcgccgccgcctacgccgctgcctccgccttcctgccccgcgtcgggccgggcgccacctcccccctgcctccctctccgctgtggtcatttaggaaatcgtaaatcatgtgaagatgggactcttggtatttgtgcgcaatctgctgctagccctctgcctctttctggtactgggatttttgtattattctgcgtggaagctacacttactccagtgggaggaggactccagtaagtatagtcactctagctcaccccaggagaagcctgttgcagattcagtggttctttcctttgactccgctggacaaacactaggctcagagtatgatcggttgggcttcctcctgaatctggactctaaactctcaccgaggactctctgcacggtggtttttggccttgactgcatattggaatcacctggagagcctaaaaaattactgatgcctgcatcccaccctctagagattttgaagtcactgagcgaggacacagcctttgcattaggatttttaaagctgcccaggcctgctgaattagccaccaagtacgcaaacttttcagagggagcttgcaagcctggctatgcttcagccttgatgacggccatcttcccccggttctccaagccagcacccatgttcctggatgactcctttcgcaagtgggctagaatccgggagttcgtgccgccttttgggatcaaaggtcaagacaatctgatcaaagccatcttgtcagtcaccaaagagtaccgcctgacccctgccttggacagcctccgctgccgccgctgcatcatcgtgggcaatggaggcgttcttgccaacaagtctctggggtcacgaattgacgactatgacattgtggtgagactgaattcagcaccagtgaaaggctttgagaaggacgtgggcagcaaaacgacactgcgcatcacctaccccgagggcgccatgcagcggcctgagcagtacgagcgcgattctctctttgtcctcgccggcttcaagtggcaggactttaagtggttgaaatacatcgtctacaaggagagagtgagtgcatcggatggcttctggaaatctgtggccactcgagtgcccaaggagccccctgagattcgaatcctcaacccatatttcatccaggaggccgccttcaccctcattggcctgcccttcaacaatggcctcatgggccgggggaacatccctacccttggcagtgtggcagtgaccatggcactacacggctgtgacgaggtggcagtcgcaggatttggctatgacatgagcacacccaacgcacccctgcactactatgagaccgttcgcatggcagccatcaaagagtcctggacgcacaatatccagcgagagaaagagtttctgcggaagctggtgaaagctcgcgtcatcactgatctaagcagtggcatctgagtgggcccagcacatggccatagaggcccaggcaccaccaggagcagcagccagcaccacctacacaggagtcttcagacccagagaaggacggtgccaagggccccaggggcagcaaggccttggtggagcagccagagctgtgcctgctcagcagccagtctcagagaccagcactcagcctcattcagcatgggtccttgatgccagagggccagcaggctcctggctgtgcccagcaggcccagcatgcaggtggtgggacactgggcagcaaggctgctgccggaatcacttctccaatcagtgtttggtgtattatcattttgtgaatttgggtaggggggagggtagggataatttatttttaaataaggttggagatgtcaagttgggttcacttgccatgcaggaagaggcccactagagggcccatcaggcagtgttacctgttagctccctgtggggcaggagtgccaggaccagcctgtaccttgctgtggggctacaggatggtgggcaggatctcaagccagccccctccagctcatgacactgtttggcctttcttggggagaaggcggggtattcccactcaccagccctagctgtcccatggggaaaccctggagccatcccttcggagccaacaagaccgccccagggctatagcagaaagaactttaaagctcaggagggtgacgcccagctccgcctgctgggaagagctcccctccacagctgcagctgatccataggactaccgcaggcccggactcaccaacttgccacatgttctaggtttcagcaacaagactgccaggtggttgggttctgcctttagcctggaccaaagggaagtgaggcccaaggagcttacccaagctgtggcagccgtcccaggccacccccatggaagcaataaagctcttccctgagcctggaaaaaaaaaaaaaaaaaaaaaaaaaaaaaaa

SEQ ID NO: 462 - DNA, 5324 bp, Homo sapiens
gaacggcgatgccccagacgcggctgcagttttcaaaccgcgactgcaagcttcggtagtcctctccgctgctgtcgccaggagtcacttcacgagaagccaggtcacaaccgtcggcccttgtctggaaaagtaaaagtggatcctgccacgttcggagctccctggcgcctcgcccggctggagctagagaactcgtcctgtggcggcccccggcgtggggcgggacagcggccccctggagggggcagtcccgggagaacctgcggcggccggagcggtaaaaataagtgactaaagaagcagacctgggaatcacctaacatgtcgaggaggagatttgattgccgaagtatttcaggcctactaactacaactcctcaaattccaataaaaatggaaaactttaataatttctatatacttacatctaaagagctagggagaggaaaatttgctgtggttagacaatgtatatcaaaatctactggccaagaatatgctgcaaaatttctaaaaaagagaagaagaggacaggattgtcgagcagaaattttacacgagattgctgtgcttgaattggcaaagtcttgtccccgtgttattaatcttcatgaggtctatgaaaatacaagtgaaatcattttgatattggaatatgctgcaggtggagaaattttcagcctgtgtttacctgagttggctgaaatggtttctgaaaatgatgttatcagactcattaaacaaatacttgaaggagtttattatctacatcagaataacattgtacaccttgatttaaagccacagaatatattactgagcagcatataccctctcggggacattaaaatagtagattttggaatgtctcgaaaaatagggcatgcgtgtgaacttcgggaaatcatgggaacaccagaatatttagctccagaaatcctgaactatgatcccattaccacagcaacagatatgtggaatattggtataatagcatatatgttgttaactcacacatcaccatttgtgggagaagataatcaagaaacatacctcaatatttctcaagttaatgtagattattcggaagaaactttttcatcagtttcacagctggccacagactttattcagagccttttagtaaaaaatccagagaaaagaccaacagcagagatatgcctttctcattcttggctacagcagtgggactttgaaaacttgtttcaccctgaagaaacttccagttcctctcaaactcaggatcattctgtaaggtcctctgaagacaagacttctaaatcctcctgtaatggaacctgtggtgatagagaagacaaagagaatatcccagaggatagcagcatggtttccaaaagatttcgtttcgatgactcattacccaatccccatgaacttgtttcagatttgctctgttagcacttttttctttgactcatttggactgaatttgaaattttatatccactccagtgagattatgatttgtagcttcatatatgacatgtttatattgtaaatgcacttttccatggaataatttagggaagtgttttaatgttaaattactagttgctagcatgttatgatttcatatcctgagatagctctgcagataagaaaatatttaaatatatgacaaaaagtaaaattgtacatgtgagtttacatgttaatgaaataattcaacttcaaatgaacttaccagaatgttttgcatatcaacaaaaaaagtggcttgagttttattatagttggtgtaaactgaacacagtgaagacattggaatttaataggttctctctctaaggtgactcttataccatgcctctatcaacataatttgtttaggaaagcagtatgaagtttaagccaaaataatttctactttatagatgctcaagagacattttacaattgaaaatgtctttcaattacaaatattttgaaacttcgtaagattttcattctctgtggtctgttatatgagagagatcctttaactagagcaaagagggagttagaaacctgatcagggatattctttacaagttggagcagaggaaagagtagcatgccttcgtattttaacgcaaatgtctttttcctcctcccaacctacttgagatctgataaggtctggaagatggagatatttggtatgcaagtgtagagttttttaatcctccagaatttctagagtagaagatacttaggtatagttaaatattctgtatttttagtcaaacatatttattaattgaatatagaagaaaatgttgacacactcagacagcttactgaattttagatgtcttctgcatcttagaatacaagccagtcattcagagttctaaaagtatgcataaaaaattacagcaccggtaggtctattaacacagtgcccgagtcagcggtagcaagactgatgtgatcataaaacatgacatcaggctcgtctgaagttcttgtgtgaaattcctagtgagtgaggaggctcagcttaaagccatctgcagagtggcccctcattgtggtcttttgctgggaccaatgcaagagactagggagagcaaaatgtttgcttatggctagagactatatccagccctaatgatggggaaagttagtccttttcgggtaatcttttatgaattttcacctgatgaccgttatattggtctgttatcatgttacgataactgtgatctcatgaccatgttgctgtatcagaagaaatagtttgacaaatggtaacaacaacctgatgttccccctttagacctttaacttctcaaaattttggtaagtttccaaattctttaataataacttaaaactttttgaataactatcaggtcactttatttgaccacatggtgaattcctttaatgtcttcagcatttgttaaggaaaagttttctctacttgtgtgtgtatgtgtgcacatgtgtgtatgtacaggtgtatgtatatatctatagatagatacaatacattctttagacacttttcaagattctttgctgtggtatattgtgctcaactcaggtgccaaaggagctttttttttttttttttttttttgagatggagttttgctctgtctctcaggctggagtgcagtggcatgatctcagctcacggcaacctctgcctcccgggttcaagcaattctcctgtctcagcctcctgagtagttgggattacaggcgcatgccaccgtgcccagctaatttttgtatttttagtagagacggggtttcaccatgttggccaggctggtcacaaactcctgacttcaagtgatccacccgcctcggcctcccaaagtgctgggattacaggcgtgagccactgcgcccccgcccaggagctcttttcttatgacatataaattatgacatttatattctttatatgactttatgttctcttcttatgacatttaaattctttaagtagtttgttggtccaataaactagacgttgtataatctaaattgagcccttgtatatctaaaactgatgagttgtttctaaattgttgattgtccatttacttgcctttggtattaagataatgcaagtaaagtttagtaagtcattggataatgaaatgattatgtttctgaagaccatattatatttttaatttttagaggaatcatgccatcccccaaaaaatcaagaaatatttgaattttaaattataagttcatttgttaaaagacatttttacaaatgtctgaaaatcttaaaatactttacatctacctttaagtagtagaatacagagctgtaaatttccatgccttttttcctgatattaagttttatagtaaaaaagcaactagtgattgcacaaagaatataaaaatccactctttttacaaaggtgtgaatttaaataacgttattgattggaatatgaaaatagaccaatcatttaagagctttttagcaaatgattcaattcttactctttttctcccaagattgaaaagcataatgtatttctctaaagtaggaatctagagagcccctgtgagtggacaaatgtcagtaacacttgaacacatgagaagataagtgttatgttgtgataatttaaagttaaatttgctttttgggtaggatccctaaatagatgggatttttaaatagatgatatatagatgacaattgcaattgtcattttaattattttccctacagtaaagaacctagctctgagcagtgaaattgtaatggcactttaaaggaagtaagccgttaactgttctctagtggagcgatctccaactgttttggcactagggacgggttttgtggaagaaaatttttccacaggactgggggtttagggggatggtttcaggatgattcaagtacattacatttatcattagattctcataaggagcatgcaacctagatctcttgcacgtgtggttcacagcaggattcgagctcctttgagaatctaatgccatggctgatctaacaggaaactgagctcaggcagtaatgcttggcaccgccccccaccttctatgcagcccggtcgtggcctggggactggggacccctgctctagtcagtaataaggtacttgtgccagaatataaatcaacacattgcttcctttatcaaagaagtcttgttatttaaaaaaagtcaactgagccagtatgattagtgatgtaattgattttcattctggcacaagcctctttcattctggacagctcacaaatagttaatggaccatgctttgaatagccttcctctaagcaacatttataaatactgatattttagaactgtttacatttcttctgtttatttttgaattttcagtttgatatcttgtccttattcattgttgtataaacaactgtactttaatttcaagtagtattaaaagtatttcacttcagtttggggggattattatcaatttataattttataaaagtattttaaagaataattgtaaattttccataaattacaacttcctgccatattttattaaataataatcttgcttaaggcatatagacagacattattatgagtattccagtaaaaaaaatctacatcaacttgaccattctggctaaaaattaaaaagcacttttttatatctgtggttgtcatttgtttcaaagcatttctaaatttattgttcttaaaagtatgtctgcatgttctagcctttgacctaggtcatctatgaaccctctttgtgtctaataaacatatctgtaaaggcaaaaaaaaaaaaaaaaaa

SEQ ID NO: 463 - DNA, 4946 bp, Homo sapiens
aaaactaagaggggtgggcagctagcgtcgtttctaggcaaccgcagactccgggtccttagccgggcctgatggccctgaggcagttcggatgtgtcccaggaagtgcccatgtgtggtccgccgtccattccacacctctgagcgcctttgtcctctgaacttctcaccagttctagcgagtaaaattgcgtcccagatgttgtggaactgtccctggatctatagctcttcaccgtctctactttcttccttctaagagatcctgaaacctctgtcatggaaaagtaccacgtgttggagatgattggagaaggctcttttgggagggtgtacaagggtcgaagaaaatacagtgctcaggtcgtggccctgaagttcatcccaaaattggggcgctcagagaaggagctgaggaatttgcaacgagagattgaaataatgcggggtctgcggcatcccaacattgtgcatatgcttgacagctttgaaactgataaagaggtggtggtggtgacagactatgctgagggagagctctttcagatcctagaagatgacggaaaacttcctgaagaccaggttcaggccattgctgcccagttggtgtcagccctgtactatctgcattcccaccgcatcctacaccgagatatgaagcctcagaacatcctcctcgccaagggtggtggcatcaagctctgtgactttggatttgcccgggctatgagcaccaatacaatggtgctgacatccatcaaaggcacaccactctatatgtctccagagctggtggaggagcgaccatacgaccacacagcggacctctggtctgttggctgcatactatatgaactggcagtaggcacccctcccttctatgctacaagcatctttcagctggtcagcctcattctcaaggaccctgtgcgctggccctcaaccatcagtccctgctttaagaacttcctgcagggactgctcaccaaagacccacggcagcgactgtcctggccagacctcttatatcacccctttattgctggtcatgtcaccataataactgagccagcaggcccagatttggggaccccattcaccagccgcctacccccagaacttcaggtcctaaaggacgaacaggcccatcggttggcccccaagggtaatcagtctcgcatcttgactcaggcctataaacgcatggctgaggaggccatgcagaagaaacatcagaacacaggacctgcccttgagcaagaggacaagaccagcaaggtggctcctggcacagcccctctgcccagactcggggccactcctcaggaatcaagcctcctggccgggatcttagcctcagaattgaagagcagctgggctaaatcagggactggagaggtgccctctgcacctcgggaaaaccggaccaccccagattgtgaacgagcattcccagaggagaggccagaggtgctgggccagcggagcactgatgtagtggacctggaaaatgaggagccagacagtgacaatgagtggcagcacctgctagagaccactgagcctgtgcctattcaactgaaggctcctctcaccttgctgtgtaatcctgacttctgccagcgcatccagagtcagctgcatgaagctggagggcagatcctgaaaggcatcttggagggtgcttcccacatcctgcctgcattccgggtcctgagcagtcttctctccagctgcagtgattctgttgccttgtattccttctgccgggaggcagggcttcctgggctgctgctgagtctactcaggcacagtcaggagagcaacagcctccagcagcaatcttggtatgggaccttcttacaggacctgatggctgtgattcaggcctactttgcctgtaccttcaatctggagaggagccagacaagtgacagcctgcaggtgtttcaggaggctgccaacctttttctggacctgttggggaaactgctggcccaaccagatgactctgagcagactttgcggagggacagccttatgtgctttactgtcctgtgcgaagccatggatgggaacagccgggccatctccaaagccttttactccagcttgctgacgacacagcaggttgtcttggatgggctccttcatggcttgacagttccacagctccctgtccacactccccaaggagccccgcaagtgagccagccactgcgagagcagagtgaggatatacctggagccatttcctctgccctggcagccatatgcactgctcctgtgggactgcccgactgctgggatgccaaggagcaggtctgttggcatttggcaaatcagctaactgaagacagcagccagctcaggccatccctcatctctggcctgcagcatcccatcctgtgcctgcaccttctcaaggttctatactcctgctgccttgtcagtgagggcctgtgccgtcttctggggcaggagcccctggccttggaatccctgtttatgttgattcagggcaaggtaaaagtagtagattgggaagagtctactgaagtgacactctacttcctctcccttcttgtctttcggctccaaaacctgccttgtggaatggagaagctaggcagtgacgttgctactctctttacccattcgcatgtcgtctctcttgtgagtgcagcagcctgtctattgggacagcttggtcagcaaggggtgacctttgacctccagcccatggaatggatggctgcagccacacatgccttgtctgcccctgcagaggttcggttgactccaccaggtagttgtggattctatgatggcctccttatccttctgttgcagctcctcactgagcaggggaaggctagcctaatcagggatatgtccagttcagaaatgtggaccgttttgtggcaccgcttctccatggtcctgaggctccccgaggaggcatctgcacaggaaggggagctttcgctatccagtccaccaagccctgagccagactggacactgatttctccccagggcatggcagccctgctgagcctggccatggccacctttacccaggagccccagttatgcctgagctgcctgtcccagcatggaagtatcctcatgtccatcctgaagcatctgctttgccccagcttcctgaatcaactgcgccaggcgcctcatgggtctgagtttctccctgtcgtggtgctctctgtctgccagctcctttgcttcccctttgcgctggacatggatgctgacctccttataggtgtcttggccgacctcagggactcagaagttgcagcccatctgctgcaggtctgctgctaccatcttccgttgatgcaagtggagctgcccatcagccttctcacacgcctggccctcatggatcccacctctctcaaccagtttgtgaacacagtgtctgcctcccctagaaccatcgtctcgtttctctcagttgccctcctgagtgaccagccactgttgacctccgaccttctctctctgctggcccatactgccagggtcctgtctcccagccacttgtcctttatccaagagcttctggctggctctgatgaatcctatcggcccctgcgcagcctcctgggccacccagagaattctgtgcgggcacacacttataggctcctgggacacttgctccaacacagcatggccctgcgtggggcactgcagagccagtctggactgctcagccttctgctgcttgggcttggagacaaggatcctgttgtgcggtgcagtgccagctttgctgtgggcaatgcagcctaccaggctggtcctctgggacctgccctggcagctgcagtgcccagtatgacccagctgcttggagatcctcaggctggtatccggcgcaatgttgcatcagctctgggcaacttgggacctgaaggtttgggagaggagctgttacagtgcgaagtaccccagcggctcctagaaatggcatgtggagacccccagccaaatgtgaaggaggctgccctcattgccctccggagcctgcaacaggagcctggcatccatcaggtactggtgtccctgggtgccagtgagaaactatccttgctctctctggggaatcagtcactgccacacagcagtcctaggcctgcctctgccaaacactgcaggaaactcattcacctcctgaggccagcccatagcatgtgattccagattcctgcggtccagcctccaactttggttgccagctctttcttattctactacacaagccgccaactcaactgagagctaaagagactagaaaagagataagctgccaactcaactgagaacaagaaactagaagagatttatatataaagcttcttccttctcccagatgcaggatgttttcaaccagtaaattttattgctgttggtgccagagaagagtcctttcttctctacatccaggggccttttctccaataatgtgcctttaactctagggacctgcctcacggaccttagggaaaaacctcaacctgaaagatctcttcctttctggagctcctttaatcttcccagcaggtttttgccttagacgtgctggccccaggacagtgatgaagacagagcctgtctcagctctaggctgtggggatcaatgccatcagtccctgttattgagggattatcccttagccaacattcctatctgtgggtgggcgtggagagtgtatctttttttggggtgtgtgtgtatatgtgtgtgtgtatgtgtgtgtgtgtttaatagttctgtttgtaaactcttttaataaaagttgtgcctcaccatacttgaagctcccaggacaagggttgagaggctcaacccctctttcagcttctatgtggtgttggaggtgctggtatcgtgttcacacaagaaaaaaaaaaaa

SEQ ID NO: 464 - DNA, 5509 bp, Homo sapiens
agatgcggccgcggcggcgcggagctcgggcggccgtggaggaactcagcctcggccgcaggaggcgccgggagcggagccgccgggagtcgcgcaacaggtttccttctccatcgctgcgcccacaggggacgcgcgccctgccgggagaggggcttctcggttcgcactctcgctcccagtccaggcaaaatgaaagaccggctagcagaacttctggacttgtccaagcaatatgaccagcagttcccagacggggacgatgagtttgactcgccccacgaggacatcgtgttcgagacggaccacatcctggagtccctgtaccgagacatccgggacattcaggatgaaaaccagctgctggtggccgacgtgaagcggctgggaaagcagaacgcccgcttcctcacgtccatgcggcgcctcagcagcatcaagcgcgacaccaactccatcgccaaggccatcaaggcccggggcgaggtcatccactgcaagctgcgcgccatgaaggagctgagcgaggcggctgaggcccagcacggcccgcactcggcagtggcgcgcatttcgcgggcgcagtacaacgcgctcaccctcaccttccagcgcgccatgcacgactacaaccaggccgagatgaagcagcgcgacaactgcaagatccgcatccagcgccagctggagatcatgggcaaggaagtctcgggcgaccagatcgaggacatgttcgagcagggtaagtgggacgtgttttccgagaacttgctggccgacgtgaagggcgcgcgggccgccctcaacgagatcgagagccgccaccgcgaactgctgcgcctggagagccgcatccgcgacgtacacgagctcttcttgcagatggcggtgctggtggagaagcaggccgacaccctgaacgtcatcgagctcaacgtacaaaagacggtcgactacaccggccaggccaaggcgcaggtgcggaaggccgtgcagtacgaggagaagaacccctgccggaccctctgctgcttctgctgtccctgcctcaagtagcaggccggcccgggccgccaccgcccatcccagaccatggagcgcgctgggaaggacgcaccaaagccgggagctctgccctgcagggagttgccccaaccctttccggaactcagtctttagaaaagaaacgccaggttcaagaattgcaaaccagcctgtgcttggaaagatggttagttgataccgtccgatgattcttcagtaaagatagattcccacaaagttgtgcaatgtcattatatgacaccttgcactcttaccgtcttgacagaagccaagtaaggaactgaagttgtatctgactgtagggtgaatgtctgaggcctgcctcctaataaagactcaaggaggaagtcaattgggcatctgctaatagaatgaactcatgatggaaacttcagttcatttactttgtcctgaaaattccctggttctgttccattttgagcgaaattggccttgggaaaaaccacgttcttcctttccgattcttcatccggtctacgctatgcaattcctccccaaatatagatcttatttctgctcatttcccctacttattaaaatcacaccaaacacttactattttcttatctctttcactttttaaatatctttcaccaggttatattttggtattatttttccaaacatttttaagcactgaatatcgaacaagcactcaaattgaagtatcagtcatgttttgtgtatttttcgctgataaaaattatttaacatttatatttttacttgattacatatgcacatgtatgtaaatgtaaaatactaatattcactaatatatgtacataatgatcaattggtttaacttcttttatgtaagtatggtatataaatttcaagacgaacacttttctggctcttggtattggtttgcttgttttgagtttgtttcactccagtttgccccttcctagtccagtttgggtcaaacttcatgttaaacaactctgcattggttatggcggtagacatatggcggtagaaaatgtatacggagctagagacaactaacattcttggaaatactgcttttgttttactgtggaccattccttccatgcattgaaatggagaaattcaaagtaaaagaattctgtttttcaagcaagcttaataaacattacattatacacatatttttatacatttctggcttgaccatttagtttactttctcaattattgttaaaatttttctttttcctttttttttttttttttttgagatggagtctcactgtgttgcccaggctggagtgcagtggcaggatcttggctcattgcaacctctgtctcccaggttcgagcgattctcctgactcagcctcctgagaagttgggactctgggcgcgtgccacaatgtctggctaattttttatgtttttagtaaagacggtgtttcaccgtgttagccaggatggtcttgatctcctgacctcgtgatccgcccgcctcagcctcccatagtgctgggattacaggtgtgagccaccatgcctggccttttttccccccttttgagacagggtctccctttgtcacccaggctgaagtgcagtggcataatcatggcttactgcagccttaaactcccaggctcaagtgatcctcccacctcagcctacaaatagctgagactacagatatgtgccaccatgcccggctaatttttgtattttctgtagagacagggtttgccatgtggcccaggctggtctcaaacttgtgagcttgagcaatccgcccaccttggcctcccaaagtgctgagattacaggcctgagccactgaccctggccaaattttttttctactagctactgaggctgccacatctggatggaactgagtggagggggaaaagaatgaaaaactcaaaagaattcccatgagggtgtcttgctttctctcctgagttacaatactttagcaaaatcatgaggctttagagatatggtgtagtctgcaaacttcttaatgcccttacccacatttaccatgtttcctggccttcctctgtgtcaactcttagctcttcctaatcattatttaatacatgagtgagtttagtagtgatcatatttctcaggtcctttagaagctggaattttaaaagaattagaaggaggagtatgtgaattctttggagctcactgcctgacttgcttatgaccaggaaaatctatcccctgtatctaattttaatttcatggttaaatttgagaattgtggaaaccaagttccacaaggctattctcatatttctcccaatttctttttcagccaactccaaggatatgtatcacctttgacttaatttgctttctctaagggaaaggggaaaaaatgttcacatagctccactgcaatgttttttataatagaggagagatattgtaaatagagactgccagccagtttccacaaaaaaacgaagagttcataaatttgacatgtttgaacccataaagcattttctttgcttggaaccattataaaagtaagtgagttttcaggctctatatacattttaattcctcacgttttatattggagagttcggtacagactgtccattactgcaccaaaagaatgagtgaactgttacctatagggaaagaacacttcttcttcctgctgtttgggaaccatctcagtgtggcgtaatggttaggagtacagattccagatcctgtttcttagatttaaatcttgactctgccacatactagctgtctgactgaaccttggtttttctgtgcttcagtttcctcatctgtaaaacggagataacagtacttacctcatagagctgttgtgaaaagtgatgactgaatatgtaaaagcacctagaacagtgcctggcacatgctaagtgctttgttcattattgttgttattatgtaattttctctcagactgagagcactgttagtgacccaagtaaatttatagtttttaagtacagaggaaaaataaagcctattttttgttaacagtcttaataaataataaaatggaataaagaaaccaagaccccatcttctgtgaatattagggcttttttttttttgacagtcataaagatgttttcactatggcatttctatccctgtgtatatccaaacatgtcctgaagaagaaatgagatgttccaccaaaaacacgtaagcaggaagcagctgttctgctcagcttggcaggtgttctttcctaattcttcccaagctgtgagtcagaaagtcctggaaggagttgtaggaagttgtagaggctgggtcactgacctaagagaaggcatcatttggcccactgcacgtcctggcctattcaccaaagcccttcctggctctgactgccacaccaggcagtgggtgaaatgctggctttttccttaagaaattgtgttctagtgccaccaagagatgctgtagagctggctttaccaatctcatgatgcttgcttggcaactctgaaaggtgactttggccaagaagaccttgtggcaattctgcaaattttatacactcatatcttttagggtacaaaatgaaagaacaaatcacaaagaacaatagatccttcaggagctgaaggtaagaatcttttatagctattttaacatatacagtgactactttctactagccaaatatcaaattttacaactaccaccaagccacagattataggtggtaacaactccagaaatgtcctaactaggaaaggtgctcatctagtatgcatcggtatccaggataatatgagttagaattttaaaaatgtcagtcattcaaaaatatttgaactgtgacatcacagaagtaattttatggccttttaaggtaacaacttaaaaagagaacagtactctttttatatcaatgcctttacatttatttaaaaacagtcctaatgctttatagttaaatgtcatatgcagatatgttcaggctctaacatataaagttcctaacttgacaggaaactactgaagattgtgtacagcttaaaaaaaaaaatagggtaactatagtcttgatttttatgtataaattctatcattctatattttaccatcagacatatttctactcctttctttgaagtatgcgaagtatctccaactgcagcatgcaactcattcatttgtaatcaagacgatagtttgaaacacccaattgtaatcagagcaacagttgacttccttttgatagcggagttgaaaatcattgcaattaataaaatggggctattagaaatggaaaacgaataggatctagaatgtaacttcatcatataaatgatgagtgtctttgttatcaacacgttattaagaatgggcaagatgtccttatatactagaagcttttgtaaagtcatgtgtctattgataataaagattttcggaactgaaaaaa

SEQ ID NO: 465 - DNA, 9352 bp, Homo sapiens
gtcgcagtatttcctgttcggattatcttttgcttccccccagctgcctccttaccctcacactcccactcctccgtttccgcggtcgaagctgccttcggccccgggtggtctcccccgcccggggaccccctgtgcctcccctcccgggctgcgggggagcccctccgagaccatgaggaaattcaacatcaggaaggtgctggacggcctgaccgccggctcgtcctcggcgtcgcagcagcaacagcagcagcatccgcctgggaaccgggagccggagatccaggaaacgctccagtccgagcactttcagctctgcaagactgttcgccatggatttccctatcaaccctcagccctggcctttgatcctgtacagaagatcctggcagtgggaactcagactggtgctttaaggctctttggtcgtccaggagtagaatgttattgccagcatgacagtggagctgcagtaatccagctccagttcctgattaatgagggagcgcttgtgagtgccttggctgatgacaccttacacttatggaatttacgtcagaagaggcctgccatactacattcgcttaaattttgcagagaaagggttacattttgccatctgcctttccagagtaagtggctctatgtgggcactgaacgaggtaatatacatattgtcaatgtggagtccttcacactctcaggctacgtcattatgtggaataaagccattgaactgtcatctaaatctcacccaggacctgtggtccatataagtgataatccaatggacgagggaaagcttttgattggctttgaatctggaacagtagttttatgggacctcaaatcaaagaaagccgactacagatacacatatgatgaggctatccactctgttgcttggcatcatgaaggaaaacaatttatttgcagtcattcagatggcaccttgactatatggaatgtaaggtcccctgctaaaccagtacagacaatcactccacatggaaaacagttaaaggatgggaagaagccagaaccatgcaaacctatcctcaaggtggaattcaaaacgactagatctggggagccttttattattttatcaggaggtttgtcatatgatactgtaggaagaagaccttgcttaacagtgatgcatgggaaaagcactgctgtgctagaaatggactattcaattgttgattttctaacgctgtgtgaaacaccatacccaaatgattttcaagaaccatatgctgtggttgttcttctagaaaaggatttagtacttatagaccttgcacaaaatggatatcctatatttgaaaatccctaccctttgagtatacatgagtcccctgttacatgttgcgaatattttgcggattgtcctgtggaccttattcctgcactttattctgttggagctagacagaaacgtcaaggttacagcaaaaaggaatggcccatcaacggaggtaattggggcttgggtgctcaaagttacccagaaataattattacagggcatgctgatgggtcagttaagttctgggatgcttctgcaataactctacaagtattatataagctaaagacatctaaagtatttgaaaagtcaagaaataaagatgacaggccaaacacagacattgtagatgaagatccatatgccattcagatcatctcctggtgtccagaaagtagaatgctgtgcatcgctggagtttcagctcatgtcattatttatagattcagcaagcaggaagtaatcacagaagtcattccgatgcttgaagttcgattattatatgagataaatgatgtggaaactccggagggtgagcagccaccacctttgccaacacccgtgggagggtccaaccctcagcccatccctcctcagtctcatccatctaccagtagcagttcatctgatgggcttcgtgataatgtaccttgtttaaaagttaaaaactcaccacttaaacagtctccaggttatcaaacagaactagttattcagttggtttgggtgggtggagaaccaccacaacaaataaccagcctggcagtcaattcttcctatggactggtggtttttggcaattgcaatggcattgctatggttgactacctccagaaagcagtgctgctcaacctgggcactattgaattatatggctctaatgatccttatcggagagaaccccgatctcctcgtaaatctcgacagccttcaggagccggtctgtgtgatattagtgaagggactgttgttccagaggatcgctgcaaatctccaacctctggttcttcatcaccacacaattcagatgatgaacaaaaaatgaataattttatagaaaaggtgaagaccaaaagcagaaagttttccaagatggtagccaatgatatagcaaagatgtcaaggaagttaagcttacctactgacctaaagcctgatttagatgtaaaggataactcctttagccgatcacggagttcaagtgtaacaagcattgacaaagaatcccgagaagcgatctccgctcttcatttctgtgaaacgtttactcgaaagacggactcgtccccttccccttgtctatgggttggaacaacgctaggaacagtgcttgtcattgcactgaaccttcccccagggggagagcaaagacttcttcagccagtaattgtgtctccaagtggtactatattgaggttaaaaggtgcaatcttgagaatggcatttctggataccacaggctgcttaataccacctgcgtatgaaccctggagagagcacaatgttcctgaagaaaaagacgaaaaggagaaattgaaaaaacggcggcctgtctcagtatccccctcctcttctcaggaaattagtgaaaaccagtatgcagtgatatgttctgaaaagcaagcaaaagtaatctcactgccaacccagaactgtgcttataagcaaaatattacagagacctcgtttgtgcttcgtggagatattgtagcattgagtaacagtatctgccttgcctgtttctgtgccaatggacatataatgacttttagtttgccaagtttaagacctctgttggatgtgtattacttgccccttaccaatatgcggatagccagaacgttctgctttaccaacaatggacaagcattataccttgtttcacctacagaaatccagagacttacttatagtcaagagacctgtgaaaatcttcaggaaatgttgggtgaactcttcactcctgtagaaacacctgaagcaccaaacaggggattctttaaaggcttatttggaggtggtgcacaatctcttgacagagaagaactatttggagaatcgtcctcaggaaaggcttcaaggagccttgcacagcatattcctggccctggtggcattgaaggcgtaaaaggggcagcatctggagttgttggtgaattagcacgagccaggctggcactagatgaaagagggcagaaacttggcgatctggaagaaagaactgcggccatgttatcaagtgcagagtcattttctaaacatgctcatgagattatgttgaaatacaaagataagaagtggtaccagttctgacaaccagaatccaataagtccaacttcagccagaaggaaaaaagttttccatttttattacattctttaggaaagttaacgttaaagggatgttcgtcactgaatactgttctttcctagcacagtcatgcactgttttacctcagtcatgtggctttaactgaggagtgttcacacgcactcgaaatggagtatatggtgtgtgccagttatgagttgaccatttgggaattaaacaggtcacacgtgacagatgaagaaaccaagggggctgctgaggagacctggtgcagggactaatcctggatcattcctgtattaaactttcatatgccaaaagggtttgtgccgttttatctgccatcagtgtttgacctgtttagggcagaggcaataagtcagaagtcttgaagttgaaatagttatatgtgtgtcattggactggattataaacagctgtcttggactttccctctcttaacactgactggtcatcagtatcattagtgaaaaagaaacaaattgtttgttatcatctctttagacagataagctgaatggtgggctttaaataataaaaacatacacatagttgacttgtgtatgagctactcttggattcttgttattatagacttgtatttagttcatattttgtcaaaagcaaaacaagaagatacatcacttttcattgaaaagaaaagtgtagagcatgactgaattgctcatcattctgggagtttccatgtagtggctatgcagtgtggaaagtgagaaaaacctccattgtggtgaggagaatacttcaatgtcccttgtccttgttctcattaattcagctaaaggtggatttgaccaaaataatgctggttaaatttgtagaaatgttgaaattggctgtgttttaaattttgcttgaatttttataaaatgtttaaccaaatgtacctttgcattctttaattaaaattgcttaaaaaaaaactttcattatttcagtaaaatgctcagctcccttttcaaaatgccctttatttgctaactgttccaatacactcaggtgatgagccaattaaatgttagtgcacatgctatcgcatggaaaattacaagcatctgttgtcaataattatataagagtttagtctgatgacctacaaaatattttgtgtagaaatatactataaatctgtacatatcctttcaaggttttaaaaaaccaaaaagaaaggaaaatatgtacactgtgataactaaattatttctgtattggaatataatacaatttgagaccagcaatggacaatgaatgattgtttcatagaatagcattacgggcaggaaagaaaccacctagtagatctagaagtaagcaatctcagaatacagactaatctgagattattattgattgttgttaaagcaacccagcaaaagcaaaatggaagcattaaaattaatgttaatgaaatttaaatattgtcttctataaaaaattcctttaaatgattttgttttttcattaagagataatcagagcacaaattgatagtaaacaggatggttgtttttctattctatatgatcattaaaggaatatgtaggacatcttaactttttcatacagtctgttatgcatattttcctctacttttcattaataaagcttttatgtttacattttataacatgcactactagatgcaaaagtttacatcaaagtttactttaaatatcatttggtagggactaaatgtgtgtgatagagataattgatcaagccaaaagaaatattttttaaataagcccttttcaaaagtttttgaatttatagaaagcaccaatgaataacatatttctgtttcgttaatgtcagctgcctgaacattcagcagtttataaattgcttaatttgtgttatctattatccagtaaacccatagttccatgatatgtcacaggaattgttaggtcctattttaaaggtacagttttgtgaatgtcatcaataaaatcaacagttatggatttgaagaagttgggaaagcattatgtagattaatatactggttggttccctatctatgtggaaggtcatattagctgcaattatttaatttgctgtgttattttgtgttatataacacaaatatatttgtatattaacttcatttttactgtcatttttcctgttgtatacaaaatgaactaatcttgtaattattttcaaatatagaagtatatacattagatggatttccaagattttgtaagaaaatcttaaatcagtgttttgagttatttaatttttaaattaatctacaaattatgcacaacaaactagagactcagttaggattagaaagcttaaagtatgtttgagtgtaggaaataagcttctcagagttatacttgattctgtctgtagataagagacagtctacagtaataactaacccagggaatttactgtaatttgagaggtaacatctctatttttttctttttaaatacagaaagtaatagtcaccagcaagccacgatttcaggaaaactgactaaaaaaaaaagtcaaaatagaaaatatcagaaaaatgaaagatttttgtgtgccctctccatatcctcattgtttttgttgcatttgtccttgactctaaaatcactgaagtattcatgattagtagtttgtaagtaggaagtggtttttctgtatgtaccatatatccagttcatttcagttttcaaactaaaatccatatgtatttgctgagaaagttatttgaaatcttatattctgacaaattctgtacattacatccatttgaagttttgcatcatcttaacacttttgctttgcatttcaattgtacaaagtgtttccaaaaaaatggttatagattcgactgagctattactaacttctccatttgattttttatggatgtgaaaaatgctgctacttgtctatgttattatgtgtaagtatattacaatttaattaagtacaatagtttaaagaacgaagcaatttttttttttttggcttagaacttcttaattgtaggttcctctgaagcgatttcatgtagatatgtgagtgttttaaacaagtctgaaagtgttacatacttttaggttacaggggtgctggggagacagctgaggaaaggaagaatatgtggaagacaccacggagttcaaagttttaccctgagttctatcttccatgtatgttttgcttaaggcatttctcatgtgacattagaaaagctatatccaaaggtaaattttttgtggcaaagatttattttacactttaacttttgggattttatttgtttcagcaaaataaagagcactgaactttaaacttgaattttttctgcacttttttaggtaatgaaaactttttattatcatttaatccacattgctcagtttaaaccaagtgatacatgtgtataaaacataccaaaatcatgaatatgctgctagctgtaccttaaataaactgatcagttttaaaacctttaatagggttttatatagatttaaaaaatagtaaaataatctgctgtatgtttcagtgttcttggtcttaaattattgcaacactttcagatttgttttaagatcatacagtaacatgttatatttatacatactgctagaaaatatacttttagttttaaaatggaatttttataaatgtactttaattttaaaatggtgaacttgttaagtttaagtcaaagtacttaaaaagtatgtatattatccatacaaaaagttatgttttacgcttataataagaaatactggtatctcatatcgagatacaattaattttaaaaaatcatacatcatttaaaaatcttcacacatgaacaggaaagatatcatttctatgctttaaaaaaccctctattgagcattttcaaatattaattttattttgggggaaaatgcccacaacaataattgcaagatctttctcaatagcttcagtttgctgttggatgcctaccttaactattgttttaaaatatagatatatatatatatatttaaaatagttttccaggtattttcttctaccttttttaaaaataaatttccaaaaatgaaaacagagtttatgtatttttgtcaatgaaggtttttattttgtagtttatagaatttgttccttatcagtttgatacttgatcaacattcttagactttttaatctgtatttactttggggggaaaaaagcactcctatatcttaaatgtccttcttttttcttttcccttttagggtatttgttctcttggattgaaatttatgcccacagatttttcttttcatttgaaaatgaatgtgaagatactgtttacagcttttgttaattgcacttttcatcactctgatcaatttcttgtaaagtgctatgggaattatttttcctgtgaatattaatgattttactactgcctccgaagttttaaaaaaggttctgtagacagaaaacagttgttgcaaccaaaaacaaccaaaaaaagaaaaaaagggaaaactggcttacctttctcagatgaattaaatgattttaataacttcccaattaccagggttataacattgctttcttcagttattaatacagtcaaattaattttaacaatataggcacaattcatttacaaattcagtacagtagtccagggctacatgtaagtggtctctttattttattctttacatcagaaaaatcatgaatgtcagttttgccagtattttacaatgaggcttatcgtttaaaattttatagtgtatgacatgtaaataaaccagtatttattgtaggttgtttgattcaggcatttcaaatggatataggttaatggcaatggaatcctatttatttggtagttggttttgtttgtttttgtttatttacttttgctatttgttttgtattgtctaaactttgcttcaactgaagacagtgtaaggagttgaaaatacaatcaacatagcaatggaaagcaatgcaaagagggtaaatcttgttttaatttttttaactttttttttttgtaaataaatagtactgtgatactttaggtgtgacctctattccacatgatagttagaaccagaaaaacacttttgctttctagttatactattggttcattgtaaatgcattaccaaaagacaatatgaaaaagagcaagattaagtttttctaacattgtccacttcaggggcaagcatgcttggtatagagctctagcttgtgtataccttaaactgtaacttgcaggtgtttttcagttgctgcactttttatttaatcttgctcagtcccagtaactatctcaaaggtaattgctggaatatgcattttgaaatacggtttaaaaaaaatctgtgtattgtttcatctaaaaagaaaagcactattggaaacactaaaaacgtgttaaactttgtagttattttgcattcctgtactttacaaactgtcatcacagcaaaaagtttaaaattaggtaatgaaatatttttgtaaataaataccgttaagctggtattttaaaaaatgtattataaattaattaatgtttctggaaaatgttcatatatatgtatatgaatgtctctttatgctgaagggctctgattgggcaaaataaaatactctaatctctcctgaaactaaacaa

SEQ ID NO: 466 - DNA, 27748 bp, Homo sapiens
cccgggcagtggaaaccgtgggcaaaagttagctggcaggacagcgcagctcctccaggcagcggaggcagcgcgtcccggctctcagggacatttccttcccacctcgacccccgggaggtggtcccggtataaaggctcgctgagcgggtgggtcacagcacagctttgcagctgcggagaaacgcccaaggccgtgcatctccaggagggcggctgggctcccgcagtcctgcagaccgcgcccgatcccggcgacagggcgggcggacagccgcgcatccccggggtcccgccgagcctgggcgcagagagccgggaggaagcgttcgctcgcttcgccttgctgctgggaaactgaacgaggccgagagagaaggttcttgagttcatgtaagaggacagtcttaaaacggaagaagaaaaagaagcagttcagtctttgggagagctgcctccttgttgagtgctgcaaaggcctggaattcatttatgacagaatagatctagaaaagtccaagcatgttttctagagtggtgtagccctgtgctgcctccagtgaagagtctcttggtgttggcttcgtgcttccggagggaccatggcaacctccagaggggcctcccggtgtcctcgggatatcgccaatgtgatgcagaggctgcaagatgagcaagagatagtacaaaaacgaactttcacaaaatggatcaactctcatctggccaagcggaaacctccaatggtggtggacgatctttttgaagacatgaaagatggtgttaaactgcttgcccttctggaggtcctgtctgggcagaaactgccttgtgaacaaggacgccggatgaagcgaatccatgctgtggctaacattggcacggcactcaagttcctcgaaggaagaaagattaaattagtcaacattaactccaccgatatagctgatggccgaccctcaatagttcttggattgatgtggaccattattctatatttccagattgaagagttgaccagcaacctgccccagctccagtctttgtccagcagcgcatcctccgtggacagcatagttagctctgagactcccagcccaccaagtaaacggaaggtgaccaccaagatccaaggaaatgctaagaaggctttattaaagtgggttcagtacacagctggcaagcagactggaatagaagtaaaagattttgggaagagttggagaagcggggttgcctttcattcagttattcatgccattcgaccggaattggtggacttggagacagtgaaaggcagatccaaccgagaaaatttggaggatgctttcactatcgccgaaacagaactggggatcccaagactgctagatcctgaagacgttgatgtggataaaccagatgagaaatctattatgacctatgtagcccagtttctgaaacattatcctgacatccacaatgcaagcactgatgggcaagaggatgatgaaatacttccaggtttcccatcttttgcaaattctgtacaaaattttaagagagaagacagagtaatttttaaggaaatgaaagtttggatagaacaatttgagagagatttgacaagagcacagatggtggaatcaaatttacaggataaatatcagtcatttaagcacttcagagttcaatatgaaatgaagaggaaacagattgaacatttaatacaaccattacacagagacggtaaattgtcacttgaccaagcattggtaaaacaatcttgggatagagtgacctccaggctctttgactggcatatacagcttgataaatctcttcctgcacctctgggcaccataggtgcctggctgtacagagcggaggtggccctgagagaggaaataaccgttcaacaggtccacgaggaaacagcaaacacgatacaacggaaacttgagcaacataaggatctgcttcaaaacacggatgcccacaaaagagcattccatgaaatctaccggaccaggtctgttaacgggattccagtgccacctgatcaattagaggacatggccgagaggtttcattttgtttcctccacatcagagctacacctaatgaaaatggaatttttagaattaaagtaccgtctgctctcactgctggttcttgcagagtcaaagctgaagtcttggatcattaagtacgggaggagagagtcagtggagcagcttctacaaaactacgtgtcttttatagaaaatagcaagttctttgaacaatatgaggtgacataccagatcttgaaacagacagctgagatgtatgtcaaagcagatggttcagtggaagaagctgagaatgtgatgaaattcatgaatgaaaccaccgctcagtggaggaatctctcagtagaagtgaggagtgtgaggagcatgctggaagaagtgatctctaactgggatcgctatggcaatacagtggctagtctgcaagcctggctagaggatgctgaaaaaatgctcaatcaatcagaaaatgccaaaaaggatttttttcgaaatttacctcattggattcagcagcatactgccatgaacgatgctggcaattttctaattgaaacctgtgatgagatggtttcccgtgacctgaagcagcaattactgttgctaaatgggcggtggagggagttgtttatggaagtcaagcaatatgctcaagctgatgagatggacagaatgaagaaggaatacacagactgtgttgttaccctgtctgcttttgcaacggaagcccataagaaactttctgaacccttagaagtctcttttatgaatgtcaagctattaattcaagacttggaggatattgagcagagggtgcctgtgatggatgcccaatacaagataattacaaagacagcacacctcattaccaaagaaagcccccaagaagaaggaaaagaaatgtttgcgaccatgtcaaagctcaaagagcagctaaccaaggtcaaagaatgttactccccactcctttatgagtctcagcagctgttgattccgttggaggaattagaaaagcagatgacgtccttttatgactcacttgggaaaatcaatgaaattatcacagttcttgagcgtgaggcacaatcgagtgccctttttaaacaaaaacatcaggaactgttagcttgtcaagaaaactgtaagaaaaccttgacacttattgagaaaggcagtcaaagtgttcaaaagtttgtgaccttgagcaacgtgttaaagcattttgatcagacgaggctacaaagacagattgcagatattcatgttgcttttcagagtatggtaaagaaaactggagattggaagaagcatgtggaaaccaacagtcgcttgatgaagaagtttgaggagtctcgagcagagttggagaaggtactgcggattgctcaggagggcctggaggaaaagggggatccagaggagctcctgcggagacacactgagtttttcagtcagctggatcagagggtgctcaatgctttcctgaaagcttgtgatgaactcaccgacatccttccagagcaggagcagcaggggctgcaggaagctgttcgaaagctccacaaacaatggaaggatcttcaaggagaagccccttatcatttgcttcatctgaagattgatgtggagaagaataggttcttagcctctgtagaagaatgcagaactgagctggatcgagagaccaagctgatgccccaggaaggcagtgaaaagataattaaagagcacagggttttcttcagtgacaaaggtcctcatcatctctgtgagaaaaggttacagctcatcgaggaactctgtgtgaaactcccagtgcgggacccagtaagggacacacctggaacctgtcacgtgactctcaaagagctcagagctgccattgacagcacctacaggaagctcatggaagacccagacaagtggaaggactacactagcagattctctgagttctcatcttggatatctacaaatgagacacaattaaaggggatcaagggtgaggccatcgatactgccaaccacggagaggttaaacgtgccgttgaagagatcagaaatggtgttaccaaaaggggtgagaccctcagctggctgaaatccaggctgaaagttttgacagaagtttcttctgagaatgaagcccaaaagcagggagatgagctggcaaaattatccagctctttcaaggctcttgtgacgctgctgtcagaggttgaaaagatgctaagcaattttggggactgtgtccagtacaaagaaatagtcaaaaattctctcgaagaattaatttctggctctaaagaagtccaggaacaagctgagaagatcttggatactgaaaatctgtttgaagcacagcagttacttcttcatcaccagcaaaagacaaagcggatctcagcaaagaagagagatgtgcagcagcagatcgcgcaggcgcagcagggagaaggggggctgcctgaccgaggccacgaggagctgcggaagctggagagcacactggatggcctggagcgcagccgggagaggcaggaacgccgcatccaggtcacattaagaaaatgggagcgatttgaaacaaacaaagaaacagtagtaagatacctttttcaaacaggttccagtcatgaacgcttcttgagttttagcagtttggaaagtttatcttcagaactggaacaaacaaaggagttttctaaacggacagaaagtattgcagtccaggctgagaaccttgtaaaggaagcttcagagataccgcttgggccccaaaataagcagctgcttcaacagcaggccaagtcaatcaaagaacaagtcaaaaaattagaagacacgcttgaagaagatattaaaaccatggaaatggtgaaaaccaagtgggatcattttggcagtaattttgagactctgtccgtctggataactgagaaagaaaaagaactcaatgccttggaaacttcgtcatctgccatggacatgcaaatcagccaaattaaggtcacaattcaggaaatagaaagtaagctcagcagcattgtaggattagaagaagaagcccagtcttttgctcagtttgttaccactggagaatctgctcgaattaaagccaagttgacacaaataagaagatacggggaagagcttcgagagcatgcacagtgtctggaaggaacaatcctgggacatttatctcagcagcaaaagtttgaagagaaccttagaaagatccagcaatctgtgtctgaatttgaagataaacttgctgttccaattaaaatatgttcttcagctacagaaacatacaaagttcttcaagaacatatggatctctgccaggccctggagtcactgagcagcgcgatcactgccttctcagccagtgccaggaaggttgtgaacagagattcctgtgttcaggaggctgcggctctacagcagcaatacgaggacatcctaaggagggcgaaggagagacagacggcgctggagaatctgctggcccactggcagaggctagagaaagaactatcatcctttttgacctggttagagcggggtgaagctaaagccagttccccagaaatggacatttctgcagacagagtcaaagtggaaggtgaacttcagttaatacaggcactgcaaaatgaagttgtatcccaggcctcattctatagcaaacttttgcaattgaaggaatcattgttctcagtagcctccaaagatgatgtgaaaatgatgaaactacatttggagcagttggatgagagatggagagatttaccacagatcattaacaaaaggattaattttcttcagtctgtggttgctgaacaccagcaatttgatgagctgctgctttccttttctgtctggattaaactgtttctcagtgaattacaaactacctctgagattagcataatggaccatcaagtagcccttactcggcataaggaccacgcagcagaagtagagagcaaaaagggcgaattgcagagtctgcagggtcacttagcaaagttgggttctctgggccgtgctgaggacctccacctcctgcagggaaaggctgaggactgcttccagctgtttgaggaggccagccaggttgtggagaggcggcagcttgccctgtcccatttggcagaattcctccagagccatgcctctctgtccggcattctccgccagctgaggcaaacagtggaagcaaccaacagtatgaataagaacgagtctgatttgatagaaaaggacctcaatgatgctcttcaaaatgctaaagcattagaatctgctgccgtcagtctggatggcattctttccaaagcccaataccatctgaaaatcgggagctctgagcaaaggacttcctgcagagccacggctgatcagctctgtggagaggtagagaggatccagaaccttctgggaaccaagcagagtgaggcagatgctctggcagtgttgaaaaaagcattccaagaccagaaagaggagcttctgaaaagcattgaggacattgaagaaaggactgacaaagagcgattgaaagaacctacccgccaagctcttcagcagaggttaagagtgtttaatcagctagaagatgaattgaattctcacgagcatgaactatgttggttgaaagacaaagccaagcaaattgcccagaaagatgtagcttttgcacctgaagttgacagggagataaaccgcttagaggtcacctgggatgataccaaaagactaattcatgaaaatcagggtcagtgctgtggacttattgacttaatgagagaatatcagaacctgaaatcagctgtatctaaagtcttagaaaatgccagcagtgtgattgtaaccagaactaccataaaagatcaggaggatcttaaatgggctttttccaagcatgaaactgccaagaacaaaatgaattacaaacagaaagacttggataactttaccagcaaaggaaaacacttgttatctgagctgaagaaaattcacagtagtgatttcagcttggtgaaaacagacatggagagcaccgtggacaaatggctggatgtatcagagaaacttgaagaaaacatggataggctgagagtaagcctgtccatttgggatgatgtactgtcaactagagatgagattgagggatggtcaaacaactgcgttccacagatggcagaaaacatcagcaacctggataaccacctcagagctgaagaactgcttaaagaatttgagtctgaagttaaaaacaaagcattgagattggaagaactgcattccaaagttaatgatctgaaagaattaactaaaaatctagaaacaccgccagaccttcagtttatagaagcagacttaatgcagaaactggagcatgccaaagaaataactgaagtagcaaaaggaaccctgaaggatttcacggctcaaagtacacaagtggagaagtttattaatgacataacaacatggttcacaaaagtggaagaatcgttgatgaactgtgcccaaaatgagacttgtgaagcattgaaaaaagtcaaggatatacaaaaagaacttcaaagtcaacaaagcaacatcagctctacccaagaaaatctcaatagcttgtgccgcaagtaccactcagctgagttggagagcctgggccgtgcaatgactggtctgataaagaaacatgaagccgtgagccagttgtgctccaaaacccaggccagcctgcaggaatctctggaaaaacacttcagtgagtctatgcaggaattccaagaatggtttttgggagcaaaggcagcagcaaaagaatcatcagatcgcaccggtgacagcaaagttctagaagcaaagctccatgatcttcagaacattttggactcagtcagtgatgggcagagcaaacttgatgcagtgactcaagaaggacaaactttgtatgcacatttgtctaaacaaattgtcagtagcattcaagaacaaatcacaaaggccaatgaagagtttcaagcatttctgaaacaatgccttaaagataagcaggctcttcaagactgtgcttcagaacttggaagctttgaagatcagcacagaaaactgaacttatggatccatgaaatggaagaaaggttcaatacggaaaacttgggagagagtaaacagcacattcctgagaagaaaaatgaagttcataaagttgaaatgtttttgggagaactgctggctgcaagagagtctcttgataagctttcccagagagggcagcttctgagtgaagaaggccacggtgctgggcaggagggccgcctgtgttcccagctcctcacaagccaccagaacctacttagaatgaccaaagagaaactccggagctgccaggtggcccttcaggagcacgaagccctggaggaagcactgcaaagcatgtggttctgggtgaaggccattcaggacagactggcctgtgcagagagcactcttgggagcaaagacaccctggagaaacggctgtcacaaatacaggatattctcctgatgaaaggtgaaggggaagttaagttgaatatggccattggcaagggggaacaggccttgagaagtagcaacaaagaaggtcagagggtgattcagactcagttagagacccttaaagaagtgtgggctgacatcatgagctcctccgtccacgctcaaagcactttagagtctgtgattagccaatggaatgactatgtagagaggaaaaaccagttggagcagtggatggaatcagtggatcaaaaaatagaacatcccttacaaccacagccaggtctgaaagagaagttcgtcctgcttgaccacctccagtccatcctgtctgaggcagaagatcacacgagagcccttcaccgtctaattgcgaagtccagggagctctacgaaaagacagaggatgagtctttcaaggacacagctcaagaggagctgaaaacacagtttaatgatataatgactgttgccaaggaaaaaatgaggaaagtggaagagattgtgaaagatcatctaatgtatttagatgcggtccacgagttcacagattggctccattcagcaaaggaagaacttcaccggtggtcagatatgtctggagattcatcagccacccagaaaaagttatcaaaaattaaggagctgatagattccagagagattggtgcaagccgtctcagcagagtggagtcgctggctcccgaagtgaaacagaacacaactgccagtgggtgtgagctcatgcacacggagatgcaggccctgcgtgccgactggaagcagtgggaagacagtgtattccaaacgcagagctgtttggagaacctggtcagccagatggccctttcggagcaggaattctcaggccaagtggctcaactggagcaggccctggaacagttcagtgcccttctgaaaacctgggctcagcagttaaccctcctggaaggcaagaacacggatgaggagatagtggaatgctggcacaaaggacaagagatactggatgctttgcaaaaagcagagcctagaacagaggatctcaagtctcagctgaatgaactttgtcgattttccagagacctgagtacctacagtggaaaagtttctggcttgattaaagagtataattgtctttgtttgcaagcatccaagggctgccagaataaagaacagattttacagcaaagatttcgaaaggccttcagggatttccagcagtggttggttaatgcaaaaatcactaccgccaagtgttttgatatacctcaaaatataagtgaagtttcaactagtcttcagaaaatacaggagtttttgtcagaaagtgaaaatggacagcacaagctaaacatgatgctgtctaaaggggaacttctgagtaccctgctgaccaaagagaaagcgaaagggatccaggccaaagttacagctgcaaaagaagattggaaaaattttcattcaaatctccaccaaaaagaatctgctctagagaatctaaagatccaaatgaaggactttgaagtaagtgctgagcctatccaggactggctgagtaaaactgagaagatggtccatgaaagcagcaatcgcctctatgatctgccagcaaagaggagggagcagcagaagctccagtctgtccttgaggaaatacactgctacgagcctcagctcaacaggctgaaagagaaagctcagcagctgtgggaaggacaagctgccagcaagagctttaggcacagagtgtcgcagctgtcttctcagtatctagcgctaagcaatttaacaaaggagaaagtgtcaagactggatagaatcgttgcagaacacaatcagttctctcttgggattaaagaattacaagactggatgacggatgcgattcacatgctggattcatactgccacccgacatccgacaaaagtgtgctggacagcaggacgctcaagctcgaggctctattatcagtcaaacaggaaaaagagattcagatgaaaatgatagtgaccaggggagaatctgtccttcagaatacttctccagaaggcattcccactattcagcagcagctgcagagtgtgaaggatatgtgggcatcccttttgtctgcagggattcgttgtaaaagccaactcgaaggagctctctccaagtggacaagttatcaggatggcgttcgacagttctccggttggatggatagtatggaagccaacctgaatgaatcagaaaggcagcatgcggagctgcgggataaaacaacgatgctcggaaaagccaagttattaaatgaagaagtgctgagttacagcagcttgctggagaccatcgaagtcaaaggggctggcatgacagaacactatgtcacccagctagaactccaggatctacaggaacgatacagagccatccaagagagggccaaggaagccgtaaccaagtctgaaaaacttgtccgcctgcaccaagagtatcagagagacctaaaggcatttgaagtttggttggggcaagaacaagaaaagctcgaccagtattcagttcttgaaggtgatgcccacactcatgagacaacattgcgtgatcttcaggagctacaggtacactgtgcagaggggcaggccctgttgaactcagtgctgcacaccagagaggatgtgatcccatcaggtatcccacaggcagaggaccgggctttagagtctctccggcaagactggcaggcttaccagcacaggctgtccgagactcgaactcagttcaataacgtggtgaacaaattgaggctaatggagcaaaagtttcagcaagtagatgaatggctcaaaacagcagaggagaaagttagtcccaggaccagacgtcagtctaacagggcaaccaaggagatacaattacatcagatgaagaagtggcacgaagaagtgactgcatacagagatgaagttgaggaagtgggagctagagctcaggagatactggacgagagccacgtgaacagcagaatgggttgccaggccacccagctgacttccagataccaggccctgcttctccaagtgctggaacaaataaaattcctggaggaggagattcagagtttggaggaatcagaatcatccctcagttcctattctgattggtatggctctactcataaaaacttcaagaatgtggctaccaagattgacaaagtagatacagtaatgatggggaagaaattgaagacgttggaggttttgctcaaagacatggagaaaggtcacagtttgctgaaatcagcccgggagaaaggagagagggctgttaaatacttggaggaaggcgaggcagagaggttaagaaaggagattcatgatcacatggagcagttgaaggaactgaccagcactgtccggaaagaacacatgacgctggaaaaaggtcttcatttagcaaaggaattctcagataaatgcaaagcactgacacagtggatagcagaataccaggaaattctacatgttcctgaagaacccaaaatggaattatatgagaaaaaagctcagttatctaaatacaagtcacttcaacaaacggtgctgtcccatgaaccatcagtaaagtcagtgagagagaagggtgaagctcttttggaactggtgcaggacgtcactttaaaggacaaaatagatcaacttcaaagtgattaccaggacctgtgcagcataggaaaggagcatgtcttcagtctggaggcgaaagtcaaagaccatgaagactacaacagtgagctccaagaggtcgaaaagtggctgctgcagatgtctggcagactggtggcacctgacctcctggagacaagcagcctggagacaatcacccagcaattggcccaccacaaggcaatgatggaagaaattgctggttttgaagaccgtttgaacaatcttcaaatgaaaggtgatactttgattggccaatgtgcagaccacctgcaagcgaaacttaaacaaaacgtgcatgctcatctgcagggcacaaaggacagctactcagcgatctgcagcacagctcagaggatgtaccagagtttggaacacgaacttcagaagcacgtcagccgacaagacaccctgcagcagtgccaggcctggctttctgcagtccagccggatttagagccaagtcctcaaccacctcttagtagggcagaagccattaagcaggtcaaacacttcagagctttgcaagagcaggcaaggacctacctagatctcctttgctccatgtgtgacctgtcaaatgcttcggtgaaaaccacagcaaaagacattcaacaaacagagcaaacgattgaacaaaagcttgtccaggcccagaacttaactcagggctgggaagagatcaagcacctgaagtctgagctctggatttacctgcaagatgctgatcagcaactgcagaacatgaagaggaggcactctgagctggagctgaacattgcacagaacatggtttcacaagttaaggattttgttaagaaactacagagcaaacaggcatccgtgaacaccataatagaaaaggtgaataagttaacaaagaaggaggaatcgcctgaacacaaggaaataaatcatttaaatgatcagtggctcgatttgtgccgtcagtctaacaacctgtgcttgcaaagggaagaggatcttcagagaacaagagattaccatgactgtatgaatgttgttgaagtgttcctagaaaaatttactacagaatgggataacttggccagatctgatgcagagagtacagctgtccacctggaagctttgaaaaagttagcattggcattgcaggagagaaagtatgctattgaagatctgaaagatcaaaagcagaaaatgatagagcatctgaatttagatgacaaggagttagtcaaagaacagacgagtcatttagagcaacgttggtttcagcttgaggacctcattaaaaggaaaatccaagtgtcagtcaccaacttggaggagttaaatgtggtgcagtccagatttcaggagctaatggagtgggcagaagagcaacaacccaacatcgccgaggcccttaagcagagccctcctccagatatggctcagaaccttctcatggatcacctggccatctgcagtgaactggaggccaagcagatgctcctgaaatcgcttataaaggacgcagacagggtcatggcagatcttggtctcaatgagcgacaggtcatccagaaggctctctctgatgcacaaagccacgtgaattgtctcagtgacttagtgggccagcgaagaaagtacttaaacaaagccttgtccgagaaaacccagtttctcatggcagtgttccaggccaccagccaaattcagcaacatgagcgaaagataatgttccgtgaacacatctgtctgttaccagatgatgtgagcaaacaagtcaaaacatgtaagagtgcacaagccagcctcaagacttaccaaaatgaagtcactggactttgggcccagggtcgcgaactaatgaaggaagtcacagagcaggaaaagagtgaagtgctggggaagcttcaggaattgcagagtgtctatgacagtgttttacaaaagtgcagtcaccggttacaagaactagagaagaatttggtttctaggaagcattttaaggaagattttgataaagcttgccactggctaaaacaagcagatattgttacatttcctgaaatcaacctaatgaatgagagttctgagcttcatacacaactggctaaataccaaaacattcttgaacaatctccagaatatgaaaatcttctacttacgctgcagagaactgggcagaccatattaccatcgctgaatgaagtcgatcattcctacctcagtgaaaagctaaatgctttgcctcgacaatttaatgtaattgttgccttggctaaagacaagttctataaagtccaggaagcaattcttgctcggaaggaatatgcttccttgattgagttgacaacccagtctctgagtgaacttgaagcccaattcttgaggatgagcaaagttcccaccgacctggccgttgaggaggctctttctctgcaagatggttgcagagccattctggacgaggtggcgggccttggggaggcggtggatgaactgaaccagaaaaaagaaggttttcgcagcacaggtcagccttggcagccagacaagatgctgcaccttgtcaccttatatcacaggctgaagcgacaaacagaacagagggttagcttattagaagacaccaccagtgcttaccaagaacacgagaagatgtgccaacagctggagagacaactgaagtctgtaaaagaggagcagtccaaagtgaatgaggaaacgctgcctgcagaggagaagctcaaaatgtatcactccctggcaggaagtctccaggactcagggattgtactgaaacgagtaaccatacatcttgaagatcttgccccacaccttgaccccttggcttatgagaaagccaggcatcagatccagtcctggcaaggggagttaaaactgttgacttctgccattggtgagacggtgacagaatgtgagagccgaatggtgcagagtatagacttccagactgagatgagtcgctccctggactggctgaggagagtgaaggcagagctcagtgggccggtgtacctagacctcaacctgcaggacatccaagaggaaatcagaaaaatccaaattcatcaggaagaggtccagtccagcttgagaatcatgaatgcgctgagtcacaaggaaaaggagaagttcacaaaggccaaggagctgatttctgcggatttagaacacagcctcgctgagctctcagagctggatggagacatccaggaagccttacgcaccagacaggctaccttgactgaaatatatagccagtgtcaaaggtattatcaggtatttcaagcagccaatgactggcttgaggatgcccaagaattgttacagctggcaggcaatggcctagacgtggagagcgcagaggaaaatctcaaaagccacatggaatttttcagtacagaggatcagttccatagtaacctggaggagctccacagcctggtagccaccctggacccactcatcaagccaaccggcaaagaagacctagaacagaaagtggcttctctggaactcaggagccagaggatgagccgggactctggtgcccaagtggatctcttgcagagatgcacagctcaatggcacgattaccagaaagcaagggaagaggttattgaattgatgaatgatacagaaaagaaattgtctgagttttctttgttgaagacttcgtctagtcatgaagcggaagaaaaattgtcagaacacaaggctttagtgtcagtggttaactctttccatgagaaaattgtggcccttgaggaaaaagcttcacaactggagaaaaccggaaatgatgccagcaaagccaccctgagcaggtcaatgaccaccgtctggcagcgctggacacgccttcgagctgtggcccaggaccaggagaagatcctggaagatgcagtggatgagtggacgggctttaacaacaaggttaaaaaggccactgaaatgattgatcagctgcaagataagttacctggaagttcagcagagaaagcatcgaaagcagagctcttaactcttcttgaataccacgacacgttcgttctggagctggagcagcagcagtcggccttgggcatgctgcggcagcaaaccctgagcatgctccaggatggagccgccccaacccctggggaagagcctccgctcatgcaggaaatcaccgccatgcaagatcggtgcctgaacatgcaggagaaagtgaagactaatggaaagttggtgaagcaagagctgaaggaccgagaaatggtggagactcagatcaattctgtgaaatgttgggttcaggaaacgaaagaatatttagggaatccaacaatagaaatagatgctcaacttgaagaacttcagattctcctaacagaagccacaaatcaccgacagaacattgaaaaaatggcagaagaacagaaggagaagtacttaggtctttataccatattaccttctgaactctcccttcagttggctgaagtggcgttagatctaaagatccgagatcagatccaagacaaaataaaagaagttgagcagagcaaggccacgagccaggaactcagccggcaaattcagaagttagctaaagacctcacaactattctaactaagctgaaagcgaagacagataatgtagttcaagctaaaactgaccaaaaggtgctgggagaggaattagatggctgtaattcaaagttaatggaattagatgcagcagtacagaaattcttggaacagaatggccaactgggtaagccactggccaagaagataggaaaactgactgaacttcaccagcagaccattagacaagctgagaatcggctctccaagctcaatcaggcagcatcacatttagaagaatacaatgaaatgcttgaattaattttgaagtggattgaaaaagctaaagtcttggctcatggaactattgcatggaattctgcaagccagcttcgggaacaatatattttgcatcagaccctgctagaagaatccaaagaaattgacagtgagctggaagcaatgactgagaaattacagtacctcactagcgtgtactgtacagaaaaaatgtctcagcaagtggcagaactgggacgggagactgaggagttgcgacagatgatcaaaattcgtttgcagaacctccaagatgcagctaaggatatgaaaaaatttgaagcagagttgaaaaagttacaagctgccttggagcaagcccaggcaacactgacttctccagaagttggacgtctcagtctcaaggagcagctctctcatcggcagcatttgttgtctgagatggagtcactgaagccgaaggtgcaagcagtgcagctctgccagagtgccctccggatccccgaggatgtggttgccagcttacctctctgtcatgctgctctgcggctgcaggaagaggccagccggctgcagcacaccgccatccagcagtgtaacatcatgcaggaagctgtggtacaatatgaacaatatgagcaagaaatgaaacatctccagcaactgatagaaggagctcacagagagattgaggataaacctgttgccaccagtaacatacaggagctgcaggctcagatttctcggcatgaggagctggcgcagaaaattaagggctaccaggagcagatcgcttctttgaattccaagtgcaagatgctgacgatgaaagccaagcacgccaccatgctgctgacggtgaccgaggtcgaggggctggcggaagggacagaggacctggatggggagctcctccccacgccttcggcccacccctctgtggtcatgatgactgcaggtcgctgtcacactttgctgtcaccggtcactgaggagtctggggaggagggaaccaacagtgagatttcctctccacctgcctgtcgctccccttcacctgtggctaatacagatgcttctgttaaccaggacattgcatattaccaagccttgtctgctgagaggttgcagacagatgctgcaaaaattcaccccagcacatccgcatcccaggagttctatgaaccgggattggagccatccgctactgccaaactgggtgatttgcagcgttcttgggaaaccttaaagaatgtgatcagtgagaagcagcgcacactctatgaagctttggaacgccagcagaagtaccaggactccctccagtccatctctacgaagatggaggccattgagctgaaactcagtgagagcccagagcctggcaggagtccagaaagccagatggctgaacatcaggcattgatggatgagattctcatgctccaggatgaaatcaatgagctccagtcctctctcgcagaggagctggtatccgagtcttgtgaggccgaccctgcggagcagctggccttgcagtccacgctcactgtcttagccgagcgaatgtccaccatcaggatgaaagcctcggggaaacggcagcttttggaggagaagttgaatgatcagctggaggaacaaaggcaggaacaggccctgcagaggtatcgctgtgaagccgatgagctggacagctggctcttgagtaccaaggccactctggacactgcgctgagtccacccaaggagcccatggacatggaggcccagcttatggactgccagaatatgctggtggaaatagagcagaaggtggtggctttatcagaactgtcagtccacaatgagaacctgctgctggagggcaaagctcacaccaaggacgaggccgagcagctggctggaaagctgagaaggctcaaggggagcctgctggagctgcagagagccctgcatgataagcagctcaacatgcagggaacagcacaggagaaggaggagagcgatgttgacctaacagccacgcagagccccggcgtccaggaatggctggcccaagctcgcaccacatggacccagcagcggcagagcagtctccagcaacaaaaagagttagaacaggaattagccgagcagaagagtctccttcgctcagtagccagtcgtggagaggagattctaattcaacattcggcggcagagacctctggtgatgctggcgaaaaacctgatgtgttatcccaggagttggggatggaaggggagaaatcatccgctgaagaccagatgagaatgaaatgggaaagcctacatcaagaatttagtaccaagcagaaactactacagaatgttctggaacaggaacaagagcaagtgctttatagcaggccaaatcgactcttgtctggtgtgccactgtacaaaggggacgtgccaacccaagataaatctgcagttacatctttgctggatggactgaaccaagccttcgaggaggtttcatcccagagtggaggggcaaagaggcagagtatacacttggagcagaagttgtatgatggagtctcagccacctctacttggttggatgacgttgaagaacgtttatttgttgccacagcacttttaccagaagaaacagagacttgtctcttcaaccaagagattcttgccaaagacattaaggaaatgtctgaagaaatggataagaacaaaaacttgttttcccaagcttttccagagaatggtgataatcgagatgttattgaagatactttgggttgtcttttgggcaggttatccttgctagactcagtagtgaatcaacgatgtcatcagatgaaagaaagacttcagcaaatactaaatttccagaatgatctgaaagtgctgtttacatcactggctgacaacaaatacatcattctgcaaaaactggcaaatgtgtttgaacagcccgtagcagaacaaatagaggcaatacaacaggctgaagatggactcaaagaatttgatgcaggaatcattgaattaaagaggcgtggtgacaagctacaggtcgagcagccgtccatgcaagaactctccaagctccaggacatgtatgatgagctgatgatgatcattggctcccggaggagtggtctgaatcagaaccttacactcaagagtcagtatgagagggccctacaagatctggctgacctgctagaaactggtcaggagaagatggcaggagaccagaaaatcatcgtgtcttccaaagaggaaatccagcaactacttgacaaacataaggaatactttcagggcctggaatctcatatgatcttgactgaaacactcttcagaaagataatcagctttgcagtccaaaaggaaacccagttccatacagagctgatggctcaggcttctgctgtactgaaacgggctcacaagaggggtgtggagctggagtacattctagagacgtggtcccatctggatgaggaccagcaggagctcagcagacagctggaggtggtggaaagcagcatcccaagcgtgggtctggtggaggagaacgaggacaggcttattgaccgcataacactctaccagcatttaaaatctagccttaatgaataccagcccaaattatatcaagtattagatgatgggaaacgacttctgatatccatcagctgctcagatctagaaagccaactaaatcaacttggagagtgctggctaagtaacaccaataaaatgtctaaggaacttcacagactggaaacaatattgaaacactggaccagatatcaaagtgaatctgcagatctaattcactggttacaatctgcaaaagaccggctagaattttggactcagcaatctgtgacagtcccacaagagctggaaatggtccgtgatcatctaaatgctttcctggagttttctaaagaagtggatgcccaatcttccctgaaatcatctgttctgagtactggaaatcagctccttcgactaaaaaaggtggacacagccacgctgcgctctgagctgtcgcgcattgatagccagtggactgacctgctaaccaatatcccagccgtccaggagaagctccaccagctccagatggataaactgccttcccgccatgccatttctgaagtcatgagttggatttctctaatggaaaatgttattcagaaggatgaagataatattaaaaattccataggttacaaggcaattcatgaataccttcagaaatataagggttttaagatagacattaactgtaaacagctgacagtggattttgtgaaccagtccgtgctacaaatcagcagtcaggatgtggaaagtaagcgtagtgataagactgattttgctgagcaacttggagcaatgaataaaagttggcaaattctgcaaggtctagtaactgagaagatccagctgttggaaggcttattggaatcttggtcagaatatgaaaataatgtacaatgtctgaaaacatggtttgaaacccaggaaaagagactaaaacaacagcatcgaattggagatcaggcttctgttcaaaatgcactgaaagactgtcaggatctggaagatttgattaaagcaaaagaaaaagaagtagagaaaattgagcagaatggacttgctttgattcagaacaagaaagaagacgtctctagcattgtcatgagcacactgcgagagctcggccaaacctgggcaaatttagatcacatggttggacaattaaagatactgctgaaatcagtgcttgaccaatggagtagtcacaaagtggcctttgacaagataaacagttacctcatggaggccagatactctctttcccgattccgtctgctgactggctccttagaagctgtgcaagttcaggtggacaatcttcagaatctccaagatgatctggaaaaacaggaaaggagcttacagaaatttggctctatcaccaaccaattattaaaagagtgtcacccacccgtgacagaaactcttaccaatacactgaaagaagtcaacatgagatggaataacttgctggaagagattgctgagcagctacagtccagcaaggccctacttcagctttggcaaagatacaaggactactccaaacagtgtgcttcgacagttcagcagcaggaggatcgaaccaatgagctgttgaaggcagccacaaacaaggacattgccgatgatgaggttgccacatggattcaagattgcaacgacctcctcaaaggactgggcacagttaaagattccctcttttttctccatgagctgggagagcaactgaagcaacaagtggatgcttccgcagcatcagctattcaatcggatcaactctctttgagtcaacacttgtgtgccctggagcaagctctctgcaaacagcagacttcattacaggctggagttcttgattatgaaacctttgccaagagtttagaagctttggaggcctggatagtggaagctgaagaaatactacaagggcaggaccctagccactcatctgacctctccacaatccaggaaaggatggaagaacttaagggacagatgttaaaattcagcagcatggctccagatttagaccgtctaaatgagcttggatataggttacccttgaatgataaggaaatcaaaagaatgcagaatctgaaccgccattggtctctgatctcctctcagactacagaaagattcagcaagttgcagtcatttttgctacaacatcagactttcttggaaaaatgtgaaacatggatggaattcctagttcagacagaacaaaagttagcagtagagatttcaggaaattatcagcaccttttggaacagcagagagcacacgagttgtttcaagccgagatgttcagtcgtcagcagattttgcactcaatcattattgatgggcaacgtcttctagaacaaggtcaagttgatgacagggatgaattcaacctgaaattgacactcctcagtaatcaatggcagggagtgattcgcagggcccagcagaggcgggggatcattgacagccagattcgccagtggcagcgctatagggagatggcagaaaagcttcgtaaatggttggttgaagtgtcctacctccccatgagtggtctcggaagtgttcctataccactgcaacaagcaaggaccctctttgatgaagtgcagttcaaagaaaaagtgtttctgcggcaacaaggcagctacatcctgactgtggaggctggcaagcaactccttctctcggcggacagtggcgctgaggccgccttgcaggccgaactcgctgaaatccaagagaaatggaaatcagccagcatgcggctggaagaacagaagaaaaaactagccttcttgttgaaagactgggaaaaatgtgagaaaggaatagcagattccctggagaaactacgaactttcaaaaagaagctttcgcagtctctcccggatcaccatgaagagctccatgcagaacaaatgcgttgcaaggaattagaaaatgcagttgggagctggacagatgacttgacccagttgagcctgctgaaggacaccctctctgcctatatcagtgctgatgatatctccattcttaatgaacgcgtagagcttctgcaaaggcagtgggaagaactatgccaccagctctccttaaggcggcagcaaataggtgaaagattgaatgaatgggcagtcttcagtgaaaagaacaaggaactctgtgagtggttgactcaaatggaaagcaaagtttctcagaatggagacattctcattgaagaaatgatagagaagctcaagaaggattatcaagaggaaattgctattgctcaagagaacaaaatacagctccaacaaatgggagaacgacttgctaaagccagccatgaaagcaaagcatctgagattgaatacaagctgggaaaggtcaacgaccggtggcagcatctcctggacctcattgcagccagggtgaagaagctgaaggagaccctggtagccgtgcagcagcttgataagaacatgagcagcctgaggacctggctcgctcacatcgagtcagagctggccaagccaatagtctacgattcctgtaactcggaagaaatacagagaaagcttaatgagcagcaggagcttcagagagacatagagaagcacagtacaggtgttgcatctgtcctcaacctgtgtgaagtcctgctgcacgactgtgacgcctgtgccactgatgccgagtgtgactctatacagcaggctacgagaaacctggaccggcggtggagaaacatttgtgctatgtccatggaaaggaggctgaaaatcgaagagacgtggcgattgtggcagaaatttctggatgactattcacgttttgaagattggctgaagtcttcagaaaggacagctgcttttcccagctcttctggggtgatctatacagttgccaaggaagaactaaagaaatttgaggctttccagcgacaggtccacgagtgcctgacgcagctggaactgatcaacaagcagtaccgccgcctggccagggagaaccgcactgattcagcatgtagcctcaaacagatggttcacgaaggcaaccagagatgggacaacctgcaaaagcgtgtcacctccatcttgcgcagactcaagcattttattggccagcgtgaggagtttgagactgcgcgggacagcattctggtctggctcacagagatggatctgcagctcactaatattgaacatttttctgagtgtgatgttcaagctaaaataaagcaactcaaggccttccagcaggaaatttcactgaaccacaataagattgagcagataattgcccaaggagaacagctgatagaaaagagtgagcccttggatgcagcgatcatcgaggaggaactagatgagctccgacggtactgccaggaggtcttcgggcgtgtggaaagataccataagaaactgatccgcctgcctctcccagacgatgagcacgacctctcagacagggagctggagctggaagactctgcagctctgtcggacctgcactggcacgaccgctctgcagacagcctgctttctccacagccttcctccaatctctccctctcgctcgctcagcccctccggagcgagcggtcaggacgagacaccccggctagtgtggactccatccccctggagtgggatcacgactatgacctcagtcgggacctggagtctgcaatgtccagagctctgccctctgaggatgaagaaggtcaggatgacaaagatttctacctccggggagctgttggcttatcaggggaccacagtgccctagagtcacagatccgacaactgggcaaagccctggatgatagccgttttcagatacagcaaaccgaaaatatcattcgcagcaaaactcccacggggccggagctagacaccagctacaaaggctacatgaaactgctgggcgaatgcagtagcagtatagactccgtgaagagactggagcacaaactgaaggaggaagaggagagccttcctggctttgttaacctgcatagtaccgaaacccaaacggctggtgtgattgaccgatgggagcttctccaggcccaggcattgagcaaggagttgaggatgaagcagaacctccagaagtggcagcagtttaactcagacttgaacagcatctgggcctggctgggggacacggaggaggagttggaacagctccagcgtctggaactcagcactgacatccagaccatcgagctccagatcaaaaagctcaaggagctccagaaagctgtggaccaccgcaaagccatcatcctctccatcaatctctgcagccctgagttcacccaggctgacagcaaggagagccgggacctgcaggatcgcttgtcgcagatgaatgggcgctgggaccgagtgtgctctctgctggaggagtggcggggcctgctgcaggatgccctgatgcagtgccagggtttccatgaaatgagccatggtttgcttcttatgctggagaacattgacagaaggaaaaatgaaattgtccctattgattctaaccttgatgcagagatacttcaggaccatcacaaacagcttatgcaaataaagcatgagctgttggaatcccaactcagagtagcctctttgcaagacatgtcttgccaactactggtgaatgctgaaggaacagactgtttagaagccaaagaaaaagtccatgttattggaaatcggctcaaacttctcttgaaggaggtcagtcgtcatatcaaggaactggagaagttattagacgtgtcaagtagtcagcaggatttgtcttcctggtcttctgctgatgaactggacacctcagggtctgtgagtcccacatcaggaaggagcaccccaaacagacagaaaacgccacgaggcaagtgtagtctctcacagcctggaccctctgtcagcagtccacatagcaggtccacaaaaggtggctccgattcctccctttctgagccagggccaggtcggtccggccgcggcttcctgttcagagtcctccgagcagctcttccccttcagcttctcctgctcctcctcatcgggcttgcctgccttgtaccaatgtcagaggaagactacagctgtgccctctccaacaactttgcccggtcattccaccccatgctcagatacacgaatggccctcctccactctgaactaagcagatgccatctgcagaagtgctggtagcataaggaggatcgggtcataagcaatcccaaactaccaacaagaggaccttgatcttggcgaaagccctcggtgtggcagctttagccctcctccagatcacatgtgtgcaaattatggcttcagaggtggaagataaacagtgacgggggaacaaacagacaacaagaaggtttggaagaaatctggtttgagactctgaaccttagcactaaggagattgagtaaggacctccaaagttccccggactcatgaattctgggcccttggcccattctgtgcacagccaaggacttcagtagaccatctgggcagctttcccatggtgctgctccaaccatcagataaatgaccctcccaagcaccatgtcagtgtcgtacaatctaccaaccaaccagtgctgaagagattttagaaccttgtaacatacaatttttaagagcttatatggcagcttcctttttaccttgttttcctttggggcatgatgttttaacctttgctttagaagcacaagctgtaaatctaaaaggcacttttttttagaggtataaagaaaaactagatgtaataaataagatcatggaaggctttatgtgaaaaaagttgaatgttatagtaaaaaaaaaaagatatttatgtatgtacagtttgctaaagccaagttttgtttgtattgatttctttgcatttattatagatattataaaatagtt

SEQ ID NO: 467 - DNA, 9717 bp, Homo sapiens
gcctgctccaagggaaggatcaggagagaagaaacgcaaatcccagaaccgtgccaacatataaaaccccacattaagggttgtacagtgcactgggatttctcaagtcacccgcttggtcctcttccaagtatactttacttcctttcattcctctctaaaacttttttaaaaactttcactcctgctctaaaagttatcttggtttcttactctaccttatgccccttgggcgaattttttcctctgaggagggaagaatagagttgctgctgcagacacatcagattccctactggtaacagctggagtgcgtcacctctgacaaaattctggggacgctgggaacactgaatcaacatgggcaatgagaacagcacctcggacaaccagaggactttatcagctcagactccaaggtccgcgcagccacccgggaacagtcagaatataaaaaggaagcagcaggacacgcccggaagccctgaccacagagacgcgtccagcattggcagcgttgggcttggaggcttctgcaccgcttctgagagttctgccagcctggatccatgccttgtgtccccagaggtgactgagccaaggaaggacccacagggagccagggggccagaaggttctttgctgcccagcccaccaccgtcccaggagcgagagcacccctcgtcctccatgccctttgccgagtgtcccccggaaggttgcttggcaagtccagcagcggcacctgaagatggtcctcagactcagtctcccaggagggaacctgccccaaatgccccaggagacatcgcggcggcatttcccgctgagagggacagctctactccataccaagagattgctgccgtccccagtgctggaagagagagacagccgaaggaagaaggacagaagtcctccttctccttctccagtggcatcgaccagtcacctggaatgtcgccagtacccctcagagagccaatgaaggcaccgctgtgtggagagggggaccagcctggtggttttgagtcccaagagaaagaggctgcaggtggctttccccctgcagagtccaggcagggggtggcttctgtgcaagtgacccctgaggcccctgctgcagcccagcagggcacagaaagctcagcggtcttggagaagtcccccctaaaacccatggccccgatcccacaagatccagccccaagagcctcagacagagaaagaggccaaggggaggcgccgcctcagtatttaacagatgacttggaattcctcagggcctgccatctccctaggagcaattcaggggctgccccagaagcagaagtgaatgccgcttcccaggagagctgccagcagccagtgggagcatatctgccgcacgcagagctgccctggggcttgccaagtcctgccctggtgccagaggctgggggctctgggaaggaggctctggacaccattgatgttcagggtcacccacagacagggatgcgaggaaccaagcccaatcaagttgtctgtgtggcagcaggcggccagcccgaagggggtttgcctgtgagccctgaaccttccctgctcactccgactgaggaagcacatccagcttcaagcctcgcttcattcccagctgctcagattcctattgctgtagaagaacctggatcatcatccagggaatcagtttccaaggctgggatgccagtttctgcagatgcagccaaagaggtggtggatgcagggttggtgggactggagaggcaggtgtcagatcttggaagcaagggagagcatccagaaggggaccctggagaggttcctgccccatcaccccaggagaggggagagcacttgaacacggagcaaagccatgaggtccaaccaggagtaccaccccctcctcttcccaaggagcaaagccatgaggtccaaccaggagcaccaccccctcctcttcccaaggcaccaagtgaaagtgccagagggccaccggggccaacggatggagccaaggtccatgaagattccacaagcccagccgtggctaaagaaggaagcagatcacctggtgacagccctggaggaaaggaggaagccccagagccacctgatggtggagacccagggaacctgcaaggagaggactctcaggctttcagcagcaagcgtgatccagaagtaggcaaagatgagctttcaaagccaagcagtgatgcagagagcagagaccatcccagctcacactcagcacagccacccagaaaggggggtgctgggcacacggacgggccccactctcagacagcagaggctgatgcatctggcctaccacacaagctgggtgaggaggaccccgtcctgccccctgtgccagatggagctggtgagcccactgttcccgaaggagccatctgggaggggtcaggattgcagcccaaatgtcctgacacccttcagagcagggaaggattgggaagaatggagtctttcctgactttagaatcagagaaatcagattttccaccaactcctgttgcagaggttgcacccaaagcccaggaaggtgagagcacattggaaataaggaagatgggcagctgtgatggggagggcttgctgacgtccccagatcaaccccgcgggccggcgtgtgatgcgtcgagacaggaatttcatgctggggtgccacatcccccccagggggagaacttggcagcagacctggggctcacggcactcatcctggaccaagatcagcagggaatcccatcctgcccaggggaaggctggataagaggagctgcatccgagtggcccctactatcttctgagaagcatctccagccatcccaggcacaaccagagacatccatctttgacgtgctcaaggagcaggcccagccacctgaaaatgggaaagagacttctccaagccatccaggttttaaggaccagggagcagattcttcccaaatccatgtacctgtggaacctcaggaagataacaacttgcccactcatggaggacaggagcaggctttgggatcagaacttcaaagtcagctccccaaaggcaccctgtctgatactccaacttcatctcccactgacatggtttgggagagttctctgacagaagagtcagaattgtcagcaccaacgagacagaagttgcctgcactaggggagaagcggccagagggagcatgcggtgatggtcagtcctcgagggtctcgcctccagcagcagatgtcttaaaagacttttctcttgcagggaacttcagcagaaaggaaacttgctgcactgggcaggggccaaacaagtctcaacaggcattggctgatgccttggaagaaggcagccagcatgaagaagcatgtcaaaggcatccaggagcttctgaagcagctgatggttgttccccactctggggcttgagtaagagggagatggcaagtggaaacacaggggaggccccaccttgtcagcctgactcagtagctctcctggatgcagttccctgcctgccagccctggcgcccgccagccccggagtcacacccacccaggatgccccagagacagaggcatgtgatgaaacccaggaaggcaggcagcaaccagtgccggccccgcagcagaaaatggagtgccgggccacttcggatgcagagtccccaaagcttcttgcaagtttcccatcagctggggagcaaggtggtgaagccggggctgctgagactggtggcagcgctggtgcaggagacccaggaaagcagcaggctccggagaaacctggagaagctactttgagttgtggcctccttcagactgagcactgccttacctccggggaggaagcttctacctctgccctacgtgagtcctgccaagctgagcaccccatggccagctgccaggatgccttgctgccagccagagagctgggtgggattcccaggagcaccatggatttttctacacaccaggctgtcccagacccaaaggagctcctgctgtctgggccaccagaagtggctgctcctgacaccccttacctgcatgtcgacagtgctgcccagagaggagcagaagacagtggagtgaaagctgtttcctctgcagaccccagagctcctggcgaaagcccctgtcctgtaggggagcccccacttgccttggaaaatgctgcctccttgaagctgtttgctggctccctcgcccccctgttgcaaccaggagctgcaggtggggaaatccctgcagtgcaagccagcagtggtagtcccaaagccagaaccactgagggaccagtggactccatgccatgcctggaccggatgccacttctggccaagggcaagcaggcaacaggggaagagaaagcagcaacagctccaggtgcaggtgccaaggccagtggggagggcatggcaggtgatgcagcaggagagacagagggcagcatggagaggatgggagagccttcccaggacccaaagcagggcacatcaggtggtgtggacacaagctctgagcaaatcgccaccctcactggcttcccagacttcagggagcacatcgccaagatcttcgagaagcctgtgctcggagccctggccacacctggagaaaaggcaggagctgggaggagtgcagtgggtaaagacctcaccaggccattgggcccagagaagcttctagatgggcctccaggagtggatgtcacccttctccctgcacctcctgctcgactccaggtggagaagaagcaacagttggctggagaggctgagatttcccatctggctctgcaagatccagcttcagacaagcttctgggtccagcagggctgacctgggagcggaacttgccaggtgccggtgtggggaaggagatggcaggtgtcccacccacactgagggaagacgagaggccagaggggcctggggcagcctggccaggcctggaaggccaggcttactcacagctggagaggagcaggcaggaattagcttcaggtcttccttcaccagcagctactcaggagctccctgtggagagagctgctgccttccaggtggctccccatagccatggagaagaggccgtggcccaagacagaattccttctggaaagcagcaccaggaaacatctgcctgcgacagtccacatggagaagatggtcccggggactttgctcacacaggggttccaggacatgtgccaaggtccacgtgtgccccttctcctcagagggaggttttgactgtgcctgaggccaacagtgagccctggacccttgacacgcttgggggtgaaaggagacccggagtcactgctggcatcttggaaatgcgaaatgccctgggcaaccagagcacccctgcaccaccaactggagaagtggcagacactcccctggagcctggcaaggtggcaggcgctgctggggaagcagagggtgacatcaccctgagcacagctgagacacaggcatgtgcgtccggtgatctgcctgaagcaggtactacgaggacattctccgttgtggcaggtgacttggtgctgccaggaagctgtcaggacccagcctgctctgacaaggctccggggatggagggtacagctgcccttcatggggacagcccagccaggccccagcaggctaaggagcagccagggcctgagcgccccattccagctggggatgggaaggtgtgcgtctcctcacctccagagcctgacgaaactcacgacccgaagctgcaacatttggctccagaagagctccacactgacagagagagccccaggcctggcccatccatgttaccttcggttcctaagaaggatgctccaagagtcatggataaagtcacttcagatgagaccagaggtgcggaaggaacagaaagttcacctgtggcagatgatatcatccagcccgctgcccccgcagacctggaaagcccaaccttagctgcctcttcctaccacggtgatgttgttggccaggtctctacggatctgatagcccagagcatctccccagctgctgcccatgcgggtcttcctccctcggctgcagaacacatagtttcgccatctgccccagctggtgacagagtagaagcttccactccctcctgcccagatccggccaaggacctcagcaggagttccgattctgaagaggcatttgagaccccggagtcaacgacccctgtcaaagctccgccagctccacccccaccaccccccgaagtcatcccagaacccgaggtcagcacacagccacccccggaagaaccaggatgtggttctgagacagtccctgtccctgatggcccacggagcgactcggtggaaggaagtcccttccgtcccccgtcacactccttctctgccgtcttcgatgaagacaagccgatagccagcagtgggacttacaacttggactttgacaacattgagcttgtggatacctttcagaccttggagcctcgtgcctcagacgctaagaatcaggagggcaaagtgaacacacggaggaagtccacggattccgtccccatctctaagtctacactgtcccggtcgctcagcctgcaagccagtgactttgatggtgcttcttcctcaggcaatcccgaggccgtggcccttgccccagatgcatatagcacgggttccagcagtgcttctagtacccttaagcgaactaaaaaaccgaggccgccttccttaaaaaagaaacagaccaccaagaaacccacagagacccccccagtgaaggagacgcaacaggagccagatgaagagagccttgtccccagtggggagaatctagcatctgagacgaaaacggaatctgccaagacggaaggtcctagcccagccttattggaggagacgccccttgagcccgctgtggggcccaaagctgcctgccctctggactcagagagtgcagaaggggttgtccccccggcttctggaggtggcagagtgcagaactcaccccctgtcgggaggaaaacgctgcctcttaccacggccccggaggcaggggaggtaaccccatcggatagcggggggcaagaggactctccagccaaagggctctccgtaaggctggagtttgactattctgaggacaagagtagttgggacaaccagcaggaaaacccccctcctaccaaaaagataggcaaaaagccagttgccaaaatgcccctgaggaggccaaagatgaaaaagacacccgagaaacttgacaacactcctgcctcacctcccagatcccctgctgaacccaatgacatccccattgctaaaggtacttacacctttgatattgacaagtgggatgaccccaattttaaccctttttcttccacctcaaaaatgcaggagtctcccaaactgccccaacaatcatacaactttgacccagacacctgtgatgagtccgttgacccctttaagacatcctctaagacccccagctcaccttctaaatccccagcctcctttgagatcccagccagtgctatggaagccaatggagtggacggggatgggctaaacaagcccgccaagaagaagaagacgcccctaaagactgacacatttagggtgaaaaagtcgccaaaacggtctcctctctctgatccaccttcccaggaccccaccccagctgctacaccagaaacaccaccagtgatctctgcggtggtccacgccacagatgaggaaaagctggcggtcaccaaccagaagtggacgtgcatgacagtggacctagaggctgacaaacaggactacccgcagccctcggacctgtccacctttgtaaacgagaccaaattcagttcacccactgaggagttggattacagaaactcctatgaaattgaatatatggagaaaattggctcctccttacctcaggacgacgatgccccgaagaagcaggccttgtaccttatgtttgacacttctcaggagagccctgtcaagtcatctcccgtccgcatgtcagagtccccgacgccgtgttcagggtcaagttttgaagagactgaagcccttgtgaacactgctgcgaaaaaccagcatcctgtcccacgaggactggcccctaaccaagagtcacacttgcaggtgccagagaaatcctcccagaaggagctggaggccatgggcttgggcaccccttcagaagcgattgaaattacagctcccgagggctcctttgcctctgctgacgccctcctcagcaggctagctcaccccgtctctctctgtggtgcacttgactatctggagcccgacttagcagaaaagaaccccccactattcgctcagaaactccaggaggagttagagtttgccatcatgcggatagaagccctgaagctggccaggcagattgctttggcttcccgcagccaccaggatgccaagagagaggctgctcacccaacagacgtctccatctccaaaacagccttgtactcccgcatcgggaccgctgaggtggagaaacctgcaggccttctgttccagcagcccgacctggactctgccctccagatcgccagagcagagatcataaccaaggagagagaggtctcagaatggaaagataaatatgaagaaagcaggcgggaagtgatggaaatgaggaaaatagtggccgagtatgagaagaccatcgctcagatgatagaggacgaacagagagagaagtcagtctcccaccagacggtgcagcagctggttctggagaaggagcaagccctggccgacctgaactccgtggagaagtctctggccgacctcttcagaagatatgagaagatgaaggaggtcctagaaggcttccgcaagaatgaagaggtgttgaagagatgtgcgcaggagtacctgtcccgggtgaagaaggaggagcagaggtaccaggccctgaaggtgcacgcggaggagaaactggacagggccaatgctgagattgctcaggttcgaggcaaggcccagcaggagcaagccgcccaccaggccagcctgcggaaggagcagctgcgagtggacgccctggaaaggacgctggagcagaagaataaagaaatagaagaactcaccaagatttgtgacgaactgattgccaaaatggggaaaagctaactctgaaccgaatgttttggacttaactgttgcgtgcaatatgaccgtcggcacactgctgttcctccagttccatggacaggttctgttttcactttttcgtatgcactactgtatttcctttctaaataaaattgatttgattgtatgcagtactaaggagactatcagaatttcttgctattggtttgcattttcctagtataattcatagcaagttgacctcagagttcctgtatcagggagattgtctgattctctaataaaagacacattgctgaccttggccttgccctttgtacacaagttcccagggtgagcagcttttggatttaatatgaacatgtacagcgtgcatagggactcttgccttaaggagtgtaaacttgatctgcatttgctgatttgtttttaaaaaaacaagaaatgcatgtttcaaataaaattctctattgtaaataaaattttttctttggatcttggcaataaaaaaaaaaaaaaaaaaaaaaa

SEQ ID NO: 468 - DNA, 3828 bp, Homo sapiens
tagttggataggcgatttcagtactttgtgagcatcgaggcaacccaacgtcactgtgctcagctgagttggcttgtatttcagagagagagagagagggagagagagtgagagagactgactcttacctcgaatccgggaactttaatcctgaaagctgcgctcagaaaggacttcgaccattcactgggcttccaactttccctccctgggggtgtaaaggaggagcggggcactgagattatatggttgccggtgctcttggaggctattttgtgttctttggcgcttgccaactgggaagtatttagggagagcaagcgcacagcagaggaggtgtgtgttggaggtgggcagtcgccgcggaggctccagcggtaggtgcgccctagtaggcagcagtagccgctattctgggtaagcagtaaaccccgcataaaccccggagccaccatgcctgctcccccgcctcaccgccggcttccctgctaggagcagcagaggatgtggtgaatgcaccggcttcaccgaacgagagcagaaccttgcgcgggcacagggccctgggcgcaccatggccgacgcagacgagggctttggcctggcgcacacgcctctggagcctgacgcaaaagacctgccctgcgattcgaaacccgagagcgcgctcggggcccccagcaagtccccgtcgtccccgcaggccgccttcacccagcagggcatggagggaatcaaagtgtttctccatgaaagagaactgtggctaaaattccacgaagtgggcacggaaatgatcataaccaaggctggaaggcggatgtttcccagttacaaagtgaaggtgacgggccttaatcccaaaacgaagtacattcttctcatggacattgtacctgccgacgatcacagatacaaattcgcagataataaatggtctgtgacgggcaaagctgagcccgccatgcctggccgcctgtacgtgcacccagactcccccgccaccggggcgcattggatgaggcagctcgtctccttccagaaactcaagctcaccaacaaccacctggacccatttgggcatattattctaaattccatgcacaaataccagcctagattacacatcgtgaaagcggatgaaaataatggatttggctcaaaaaatacagcgttctgcactcacgtctttcctgagactgcgtttatagcagtgacttcctaccagaaccacaagatcacgcaattaaagattgagaataatccctttgccaaaggatttcggggcagtgatgacatggagctgcacagaatgtcaagaatgcaaagtaaagaatatcccgtggtccccaggagcaccgtgaggcaaaaagtggcctccaaccacagtcctttcagcagcgagtctcgagctctctccacctcatccaatttggggtcccaataccagtgtgagaatggtgtttccggcccctcccaggacctcctgcctccacccaacccatacccactgccccaggagcatagccaaatttaccattgtaccaagaggaaagaggaagaatgttccaccacagaccatccctataagaagccctacatggagacatcacccagtgaagaagattccttctaccgctctagctatccacagcagcagggcctgggtgcctcctacaggacagagtcggcacagcggcaagcttgcatgtatgccagctctgcgccccccagcgagcctgtgcccagcctagaggacatcagctgcaacacgtggccaagcatgccttcctacagcagctgcaccgtcaccaccgtgcagcccatggacaggctaccctaccagcacttctccgctcacttcacctcggggcccctggtccctcggctggctggcatggccaaccatggctccccacagctgggagagggaatgttccagcaccagacctccgtggcccaccagcctgtggtcaggcagtgtgggcctcagactggcctgcagtcccctggcacccttcagccccctgagttcctctactctcatggcgtgccaaggactctatcccctcatcagtaccactctgtgcacggagttggcatggtgccagagtggagcgacaatagctaaagtgaggcctgcttcacaacagacatttcctagagaaagagagagagagaggagaaagagagagaaggagagagacagtagccaagagaaccccacggacaagatttttcatttcacccaatgttcacatctgcactcaaggtcgctggatgctgatctaatcagtagcttgaaaccacaattttaaaaatgtgactttcttgttttgtctcaaaacttaaaaaaacaaacacaaaaagatgagtcccaccccccactaccaccacacccatcaaccagccacattcacgctactccccagatctcttcccccattccttcttttgggctctagaaagtcttgcctcattgagtgtttttccctagtgcgtagttggagtctgtccctgtcttggtgttaatgttgacattgttatataataaatgataatatatttttttctttcaattttcttaatgggacccagtcccttatttggggggaggtctgaggcaagtatatttcaaaatatgtacttgcgggattcccttcaagtaaaccatccctgaaacctaaattcacgtttccccttgactaagaaaagcacctacctctgccatgtgatgtttctgaaaagcctctgtatgtccccatttgctttggttttgtcctgccttctccaatatcacgtgctcagttttgcctctacttacccatggagtcaggataacactgacgctccctggcatcctatcttattcagccctaccatcttgccagctctgtctttccagctgtctgtcgctaaaacgtggcctatagcttcccttccggaaagcttgctttgaaaaacttaaaaagcccccgtttacatgtaggcaggactgtgataacagtgcaagctctgtgttgacaagagttgtggacaaaaagccaaaataaatattcttcctgattaaaaaaattttttttgaaaaaaacaaggccagccccaaccttccaaacctccatcaccaacaacccaaactggatgtcaagcaaaatgcacaattcctacagaagaggcaagacacagtcaccaatgatatctcgccaaagaaaccacgcccacaccaatgccaacacaaaactgtgtttactgaaagccgaaaacagtattaaaaaaagtgtgtaagtaaagtgttatggtagggttcttcagatgtaatattttactggtactatttatttataaataggaattctaattaagtaataacatgaaatgaaacccagcataggagctggccaagagcttttaattttattgatactcaaaaccaagtttgtgtttttttgtttttttttgtttttttcctctttcgaatgtgctttgctttttttgattaaaaagaattttttttttccttttttataaacagaccctaataaagagaacagggtaagatgtgaggctgagtgtgtttaagtacgtgagagagtgtgagtgtgtttgtaagtgagtgtccctatgcgattatgtctctttacgttgctaaggggggagggtgaggattaagtactcgtgccttatatttgtgtgccaattaatgcctaataaataccatgtgcttaaacaagtaaaaaaaaaaaaaaaaaaaaaaaaaaaaaaaaaaaaaaaaaaaaaaaaaaaaaaaaaaaaaaaaaaaaaaaaaaaaaaaaaaaaaaaaaaaaaaaa

SEQ ID NO: 469 - DNA, 5114 bp, Homo sapiens
ggaataagtgacatcatgagtgtgtgccaggtgtctgattacagaaggtgttcaattaatctgcaatcattaattaacccttcagtcgctggtattatttgccatccatcctccgagtgttgccaagttatgggtgcgttctgccagcgtcctagcagtggtaaggcttctggctgccagcggcgaacctctcccttcgagtatttctcctcttgctgagatgaaatgcgaccgggtctctttaagggccaggcgccgggatccaggcggcgcccaacggctggactagcagtcgtccgcgccgactcgcacaagaaggaaccccgggcctctggatccgctcgcccggctatgctgctgtggccgctgcggggctgggccgcccgggcgctgcgctgctttgggccgggaagtcgcgggagcccggcctcaggccccgggccgcggagggtgcagcgccgggcctggcctcccgataaagaacaggaaaaagagaaaaaatcagtgatctgtgtcgagggcaatattgcaagtgggaagacgacatgcctggaattcttctccaacgcgacagacgtcgaggtgttaacggagcctgtgtccaagtggagaaatgtccgtggccacaatcctctgggcctgatgtaccacgatgcctctcgctggggtcttacgctacagacttatgtgcagctcaccatgctggacaggcatactcgtcctcaggtgtcatctgtacggttgatggagaggtcgattcacagcgcaagatacatttttgtagaaaacctgtatagaagtgggaagatgccagaagtggactatgtagttctgtcggaatggtttgactggatcttgaggaacatggacgtgtctgttgatttgatagtttaccttcggaccaatcctgagacttgttaccagaggttaaagaagagatgcagggaagaggagaaggtcattccgctggaatacctggaagcaattcaccatctccatgaggagtggctcatcaaaggcagccttttccccatggcagcccctgttctggtgattgaggctgaccaccacatggagaggatgttagaactctttgaacaaaatcgggatcgaatattaactccagagaatcggaagcattgcccataggaggcaaaaggtctatggctcatgtctgaaaaatgcctgctgctgccaagttagctattgggagcaatctggaaaaacttgctcccaggagggctttgtgtctggccagcttgattttcctaatggtctcatctcctttgctagtgtctttgtcatgcgtctctggccctcgtgggtaaatgacaaacgggaccaatgggtttgccaagccctttgctgttcgcagcctcacattcccccggtgcctctcccatggctttgtgctgctgagtcgctctcatgaagcccttagggagagcacctgttgtgtgcctgacaccacgctggagctgtgtaccaatcgtctcagccttcattaggaggccgaggtaggagtcttatatcccaggtgaggaatttgaagctcagaaaggttgaggggctccccagaggtcacacagcctgtgtgcagtggagctggcaccattcagactttcagccgactcagcaactttcccttgccctgggctgcctcctcctgagagctgttccccaccgccctgcctcttccggttggaggctctcatgtctctttggggagagctggcagtgtgcggagctgataacattttcccaatattgagcagttcccaaggacagtcagcatttctagacttccacaaaattatgctgcatttggctggagcccggtgttcagtggtttccctgcccgaggtcgctgcagccccatctaccacatcttcatgtggacattgagattcacatgctggctcctgaagggtgctcagtctccttggtgattaaggtcctgcttgaactgctgccaactccatgtcagggaagtcgcttttggtgcctggctggtttgcccagagccaagctggggcaaggggcagccagccctggcttccaaggctcccgtactgtctgtgtccttgtataaggagctttgctcttggaattactgaaagtctgtggcccaagagagagacacaagtggccttaagtctttttgaagtgttatttcatccagggaaatgcctcgagccatagagcctgaaatcatctttgttggctcagaaaataccttagcttcactcagctggactgcattgaaggcgaggctgccccttggatcaagcagaaaacaagagaaagaaagaacgttccctttggggatagtctggaaagttgggatttgcaaataaaggctctggaagcattgctggtcctgaagctttggaggtgggcagagagagcttcaagaagactagatgcaaaccctggaaaggattaaggctcaactctggagaaacaggccacagcctctcagagcagctgttggctgtaaatagaggtagcaaggccgctcccaggcccctgtgagtgtgggcacctgtgcatgcaatgctccgactctgcagaggtgccaagtgcccctgctgggccagtcccagagagttaggaagtcaaggcctgcaactcctggttcttcctgtttggaccagttcttgtgccattggcaggatgagaggcagcagccaggcgggagctgtgtctagcagcacctgtagcccacgtgctgctaattagctggaaaactggcgaaggcagaacctttgctaccaggaatcttgacatgtggggtctgtctttgagaatttgtaaatgaacagtccaatatttcctctcggctcattttgcacatccatttttggggaaatgtgatttctctctctttttttttttttttttttgcctaaggcacaatctcaagaggtcctgagaccacgtacccatgatttttttcttgctctgtgatacccaataactccttcacctaagccctgttgttgattttgaagtgcttcctaggccagtgattttagcttctgccagctgcttttgccagtagattaacgtgtttttatttttcaaactccgtgtttcctaacgtggagtgtatgggtctaagagagcctgctgtcctccctgccttccaccttggagaggaggctggacgcatcagcagtggccagggcaggtcgcaaaatctcccagcctagagaccacacctgaaacggctgaagccagcttgcacaagggctgctgtccctctgcggcaggcagagctggtgggggcaggggtcacagagcagtcatagacaccatggaccagggcaggagaagggcagatggcacatgggcacaacagggccttgtccttagagcactggggggtcatggctgggaggggcatggcaggggctggcatccctgtagagccagaggggccacccagggcagtgacattccagatatgttgggctcacctcatccttgctgtgagactggagttccatggggacatgaagtcagtacaccgcagagctgctcagctgctctacctctcgctgacttttttgttgcacatatacattttctttcaattagcatttatttcagcttttatttaagctttttgacagtacatgtaaaatatatgattataaccatttaaaaataccttatgtacctggttttttttggaaactagatagaaatatatttatcttttacataaaagaagtgtgtagtggggtggtccagggctttgtggtggcttagtggccatcggggtcccaggctcttcccacctttctcttttgggtccacctcttggctcctggcttccttcctctggggcctgactgtccaggatggcagctggagctcctgctctgggcacggttggcatcagagcccactgctccccatccactctttaatccagatgctggtaatgtccctttccaaggcataactaagataagctggaaggttcttacgaggctttgctagaggccctgggaggtggggggaaaggcaagagggcagtgcccacccatagaccgggtcacatgacctggcatcagcgccgtggggtcctttgggcttcacctccctctcccctctgcccccacgtcatcccaccctcatcctcaccctcaccattcccatcccgtaccgtaatgtcccttgcaaggcctaactctgtgaggaatgaaaccacctcatccttgttccaataacatgagtgaccgaatttacaaacgagtgaatgtggacctctggaaacattacccagcttgtttttacttttcactttctctttctgcccctttcatttccgtaggagccctttacctagatgagaagtgtccccccgcctggggaatatatcagtcagaacaatcttcctgcagacatgcaccattagacccgagtgacggtggtgccatttaaacctcagagcaggtaaaaggtggtcctgaaacctgtctacccacagggtgctatggaatctgaatcacttcttttttcctagagccctggggtggggagctccctcaagtgttcacatgtgtgtggaatgaggaacacccatctccttggccctctccaccctgaagagttagttattaaaataattggcaagctcttgcaaatgtcagtcatccattgttcagaatggaatagcaataatacatccctggctgccctgggcttggccaggattactcactgaaggcctcagggttactggcacacactttcttttcctaataatcccatcccctcagctttcctaaggctagagtgaatttcgtgttcctttagtttacataagatggtgaacttggcaaaagctatcattaaacagaagctaagagaaagcctatgtcgtggaatccagaatgggtattgccattcactgctgtccacagaagctgtcttgaatttctttctgtgtcttttctttttttttctttaagactgttgtttaccagactgggctctgtggaacacaggtgtcctgggagatggttaatcattacaaaatattggtaacaatctaaagatgcatacataagagagtggtcaaataaaccattttccattca

SEQ ID NO: 470 - DNA, 4511 bp, Homo sapiens
ctggcaggtcccagaaggtggcgagtttcgcggccagaggcttacaggtccaggtggagaggccgggctggccagggcttcggcctccggcgtcgggaaatggcggcggggggcaggatggaggacggttccttggatatcacccagagtattgaagacgacccacttctggatgcccagcttctcccacaccactcattacaagctcactttagaccccgattccatcctcttcctacagtcatcatagtgaatcttctgtggtttattcatctcgtgtttgttgttttagcatttttaacaggtgtgctttgttcttatcctaatccaaatgaggacaagtgcccaggaaattacacaaacccattgaaagttcagacggttataatccttgggaaagttattttgtggattctccatttactccttgaatgctacatccagtatcaccacagcaaaatcagaaaccgaggctataacttgatctaccgatcaacaaggcatctcaagagacttgcgttgatgatacagtcctctggcaacacagtgcttctcctcatactgtgcatgcagcactccttcccagagcctggcagattgtatcttgacctcattctggccatcttggcactggaactcatctgttccctgatatgtctcctcatttacacagtgaaaatccggagatttaataaagctaaaccagagcctgatatacttgaagaagaaaaaatctatgcttaccccagcaatattacctcggagactggattcagaactatttcaagcctagaagaaattgttgaaaagcaaggagacaccattgaatacctgaagcgacacaatgcgctgctgagtaagcgattgttggctctcacttcctcagacctgggctgtcagccaagtagaacgtgagaggctcacggtcatgacagcaattgcagaggaacccagagtaattgagactgactgaccacctgacaagctgccacggggaactgcagcttttgctgaatagcattttacagtgtttgttggaaacctgaatttggttctgacttctgtggctgtttaaaatatagggcttgtgggtcacttgaaaagtacctgtagaagcccggataacttgaggggaatgtctgtttgtacttttggaaattatttaactgcttggtttatcctaggatcagaggctaaacaactccatagtcaacacttttccacctgacattagaaccctgtaatgatttcattatggataggggaagtctaacaagacaatcgattttaaacagggttttaatcaaataagttcttcccacttttaagctgatgaaagaagtcattatttcttgtgaatattttttcctggagagccttatcatgtattttatatgcttatgtggtgttggatgacatcatggaccatatagcttttatagagaatttttctcaccataggactgaggtctcaccaggtgatctactatgcaaattcctacagttttctattcttaagaaataagggctgggcacggcggatcatgaggtcaggaaattgagaccatcctggctaacacggtgaaaccctgtctctactaaaaatacaaaaaaaattagccgagcatggtggcgggcacctgtagtcccagccacctgggaggctgaggcaggagaatggtgtggacccaggaggcggagcttgcagtgagccgagatcacgccactgcactccagcctgggcgacagagcgagactccgtctcaaaaaaacaaaaaagaaaaagaaaagaaataagatatgatgattgattacttggaccagtgttagaccgacctgtgttagacgaacctgtgttgcctattatattggcagcaccttccattagcaatagctgaaaaattcagagaagaatttagaactttcactttatttttgccattcttcaagaagttgctgtatatttcagtctggttataccttcaattgatcaataacttcaattataggaaaggcatcttctataattttaaattactgtaaaaaaaagataccttttaaagccttggattatacttaaaaattgtaatggaagaaatgcatattaagttatatgcagatattaaacatatctgattctgaagataaaactgaagtatttttcagagcaaatggcattatttctccatttttcctagtatgcccctttaatttgtcagtttgctgttagcactgttatatgctgccttagaaagacttttggttgaaggctgaatatgaggggaggggatatttatgactgtgttaatcttttttgatcattagctgaatattcaatatttgatatgtaaccatatagggatgtgttcgatataactatataggcaagggatatattgatttggccacatctatttgacttatggagggcaaatacctgtttcttttagatacagccattgccggggcattctaaaagttttctactaagataaagatgattgtgtatggctgggagcagttgctcatgcctgtaatcttagtactttgggaggctgaggcaggaggatcactcaaggccaggagtttgagaccagcctgggcaacaatgagacactgtctctcaaaaaaaaaaaaaaaagatcgtgtgtcacctgcacacaacattcacaaactaaagccaaattgtatttttaaaatttcctttctcccttccgtttttttttgttttttgggggtttttttttttgttgttgtttttgagacagagtctcaccctgtcgcccaggctggagtgcaatggcgcctttctttctttctttttttttcagacggagtctcgctctgttgcccaggctggagcgcagtagcatgatctcggctcactgcaacctccgcctcccgggattaagaaattctcctacctcagcctgctgagtagctgggattacaggcacatgccaccatgcctggctaatttttgtatttttagtacaggcggggtttcaccatgctggccaggctggtctcaaactcctgaccttttgatccgccctccttggcctcccaaagtgttgggattacaggcatgagccactgtgcccggccttcctttctttttaataagtgtatgtatctcaaagccattgccttctctagaaatctgtttctctgttctggaagagcctataaactttgccttcagttgtttttcttttcaaaagggaacaccagtggtagatgattaactcttatttatttttaaaatttaatttggatctatagtcagtatctgagatttataggatgaactttggtttacaaggaacagtgtagttaaaaagttagggtgcctatgttcttatgtaatcatcaacatgtttgttgtataatcatcaacatttttctgaatgcaatgatgaacatttcaaacaataaatgaaaatgaaactaagtatcagaagtagcaaaacagctgatgcagtggcttacgcctgtaatcccagcacttcgggaggctgaggcaggtggatcacctgaggttaggagctcaagaccagcctggccaacatagtaaaaccccatctttactaaaaatacaaaataagccaggcatggtggcacgcatctgtaatcccagctactcaggaggctgaggcaggagaatcgcttgaacacaggaggcagaggttgcagtgagctgaaattgcaccactgcattccagcttgggcaacagagctagactcgatctcaaaaaaaaaagaagtaacaaaacagaaaaatgaacaaaacaatttaaatgttaaacattctattcaccaggctggtaattgtgctagcactgaggatacaaaaattaaagactctggttggcagcttacattctaaagagagcgaggaatagatttccagactctgtgctaagtgcagtaatgacagtaggcccaacatgctgtaggagctccacgtcagggggtaccctgggggcaggagggtagagggttttaagaatgtcagacagaacaatgagtaaagtaggaaggcaaatagctacaaaatatcacaagcactgtgtatagctggaaccaaaagtgtgaggcaggacctgggtggagaggtagacagggtcagagcttggagggccttgatactatgctggaagactgcactttatcttgttgataatgggatcctctgaagcatttcaagcaaggaagtgacaatgtcagttttagtttcagcaggatcagatggtagttcaatatggaggaaatatgtgtggcagaaagatatggccctgaactagggcaggtatagtaaaccttttattataagtatgtatgtgtataggtatatagatagatataggtatatatgtatgtatatgtattccaaatgacaacagtatcatgacttattataaagttaaaagctcattttttaaaaaatggcaatatggaaaaatataaagcaaaacaattatttgaaatctcaaaaaaaaaaaaaaaaa

SEQ ID NO: 471 - DNA, 1048 bp, Homo sapiens
aaggcgggggcgggggcggggcggcggccgtgggtccctgccggccggcggcgggcgcagacagcggcgggcgcaggacgtgcactatggctcggggctcgctgcgccggttgctgcggctcctcgtgctggggctctggctggcgttgctgcgctccgtggccggggagcaagcgccaggcaccgccccctgctcccgcggcagctcctggagcgcggacctggacaagtgcatggactgcgcgtcttgcagggcgcgaccgcacagcgacttctgcctgggctgcgctgcagcacctcctgcccccttccggctgctttggcccatccttgggggcgctctgagcctgaccttcgtgctggggctgctttctggctttttggtctggagacgatgccgcaggagagagaagttcaccacccccatagaggagaccggcggagagggctgcccagctgtggcgctgatccagtgacaatgtgccccctgccagccggggctcgcccactcatcattcattcatccattctagagccagtctctgcctcccagacgcggcgggagccaagctcctccaaccacaaggggggtggggggcggtgaatcacctctgaggcctgggcccagggttcaggggaaccttccaaggtgtctggttgccctgcctctggctccagaacagaaagggagcctcacgctggctcacacaaaacagctgacactgactaaggaactgcagcatttgcacaggggaggggggtgccctccttcctagaggccctgggggccaggctgacttggggggcagacttgacactaggccccactcactcagatgtcctgaaattccaccacgggggtcaccctggggggttagggacctatttttaacactagggggctggcccactaggagggctggccctaagatacagacccccccaactccccaaagcggggaggagatatttattttggggagagtttggaggggagggagaatttattaataaaagaatctttaactttaaaaaaaaaaaaaaaaaa

SEQ ID NO: 472 - DNA, 4802 bp, Homo sapiens
gctggggcccgacccgggattagttggtttcggagcggaggagggagccccgaccgtcacgagcgtcgaagagacaaagccgcgtcagggggcccggccggggcgggggagcccggggcttgttggtgccccagcccgcgcggagggcccttcggacccgcgcgccgccgctgccgccgccgccgcctcgcaacaggtccgggcggcctcgctctccgctcccctcccccgcatccgcgaccctccggggcacctcagctcggccggggccgcagtctggccacccgcttccatgcggttcgggtccaagatgatgccgatgtttcttaccgtgtatctcagtaacaatgagcagcacttcacagaagttccagttactccagaaacaatatgcagagacgtggtggatctgtgcaaagaacccggcgagagtgattgccatttggctgaagtgtggtgtggctctgtagagatagagtttcatcatgttggccaggatggtctcgatctcctgaccttgtgatccgcctgcctcggcctcccaaagtgctggattacaggtgtgagccaccacgatcagcctctagtgtttaaaaaagaacgtccagttgcggataatgagcgaatgtttgatgttcttcaacgatttggaagtcagaggaacgaagttcgcttcttccttcgtcatgaacgcccccctggcagggacattgtgagtggaccaagatctcaggatccaagtttaaaaagaaatggtgtaaaagttcctggtgaatatcgaagaaaggagaacggtgttaatagtcctaggatggatctgactcttgctgaacttcaggaaatggcatctcgccagcagcaacagattgaagcccagcaacaattgctggcaactaaggaacagcgcttaaagtttttgaaacaacaagatcagcgacaacagcaacaagttgctgagcaggagaaacttaaaaggctaaaagaaatagctgagaatcaggaagctaagctaaaaaaagtgagagcacttaaaggccacgtggaacagaagagactaagcaatgggaaacttgtggaggaaattgaacagatgaataatttgttccagcaaaaacagagggagctcgtcctggctgtgtcaaaagtagaagaactgaccaggcagctagagatgctcaagaacggcaggatcgacagccaccatgacaatcagtctgcagtggctgagcttgatcgcctctataaggagctgcagctaagaaacaaattgaatcaagagcagaatgccaagctacaacaacagagggagtgtttgaataagcgtaattcagaagtggcagtcatggataagcgtgttaatgagctgagggaccggctgtggaagaagaaggcagctctacagcaaaaagaaaatctaccagtttcatctgatggaaatcttccccagcaagccgcgtcagccccaagccgtgtggctgcagtaggtccctatatccagtcgtctactatgcctcggatgccctcaaggcctgaattgctggtgaagccagccctgccggatggttccttggtcattcaggcttcagaggggccgatgaaaatacagacactgcccaacatgagatctggggctgcttcacaaactaaaggctctaaaatccatccagttggccctgattggagtccttcaaatgcagatcttttcccaagccaaggctctgcttctgtacctcaaagcactgggaatgctctggatcaagttgatgatggagaggttccgctgagggagaaagagaagaaagtgcgtccgttctcaatgtttgatgcagtagaccagtccaatgccccaccttcctttggtactctgaggaagaaccagagcagtgaagatatcttgcgggatgctcaggttgcaaataaaaatgtggctaaagtaccacctcctgttcctacaaaaccaaaacagattaatttgccttattttggacaaactaatcagccaccttcagacattaagccagacggaagttctcagcagttgtcaacagttgttccgtccatgggaactaaaccaaaaccagcagggcagcagccgagagtgctgctatctcccagcataccttcggttggccaagaccagaccctttctccaggttctaagcaagaaagtccacctgctgctgccgtccggccctttactccccagccttccaaagacaccttacttccacccttcagaaaaccccagaccgtggcagcaagttcaatatattccatgtatacgcaacagcaggcgccaggaaaaaacttccagcaggctgtgcagagcgcgttgaccaagactcataccagagggccacacttttcaagtgtatatggtaagcctgtaattgctgctgcccagaatcaacagcagcacccagagaacatttattccaatagccagggcaagcctggcagtccagaacctgaaacagagcctgtttcttcagttcaggagaaccatgaaaacgaaagaattcctcggccactcagcccaactaaattactgcctttcttatctaatccttaccgaaaccagagtgatgctgacctagaagccttacgaaagaaactgtctaacgcaccaaggcctctaaagaaacgtagttctattacagagccagagggtcctaatgggccaaatattcagaagcttttatatcagaggaccaccatagcggccatggagaccatctctgtcccatcatacccatccaagtcagcttctgtgactgccagctcagaaagcccagtagaaatccagaatccatatttacatgtggagcccgaaaaggaggtggtctctctggttcctgaatcattgtccccagaggatgtggggaatgccagtacagagaacagtgacatgccagctccttctccaggccttgattatgagcctgagggagtcccagacaacagcccaaatctccagaataacccagaagaaccaaatccagaggctccacatgtgcttgatgtgtacctggaggagtaccctccatacccacccccaccatacccatctggggagcctgaagggcccggagaagactcggtgagcatgcgcccgcctgaaatcaccgggcaggtctctctgcctcctggtaaaaggacaaacttgcgtaaaactggctcagagcgtatcgctcatggaatgagggtgaaattcaacccccttgctttactgctagattcgtctttggagggagaatttgaccttgtacagagaattatttatgaggttgatgacccaagcctccccaatgatgaaggcatcacggctcttcacaatgctgtgtgtgcaggccacacagaaatcgttaagttcctggtacagtttggtgtaaatgtaaatgctgctgatagtgatggatggactccattacattgtgctgcctcatgtaacaacgtccaagtgtgtaagtttttggtggagtcaggagccgctgtgtttgccatgacctacagtgacatgcagactgctgcagataagtgcgaggaaatggaggaaggctacactcagtgctcccaatttctttatggagttcaggagaagatgggcataatgaataaaggagtcatttatgcgctttgggattatgaacctcagaatgatgatgagctgcccatgaaagaaggagactgcatgacaatcatccacagggaagacgaagatgaaatcgaatggtggtgggcgcgccttaatgataaggagggatatgttccacgtaacttgctgggactgtacccaagaattaaaccaagacaaaggagcttggcctgaaacttccacacagaattttagtcaatgaagaattaatctctgttaagaagaagtaatacgattatttttggcaaaaatttcacaagacttattttaatgacaatgtagcttgaaagcgatgaagaatgtctctagaagagaatgaaggattgaagaattcaccattagaggacatttagcgtgatgaaataaagcatctacgtcagcaggccatactgtgttggggcaaaggtgtcccgtgtagcactcagataagtatacagcgacaatcctgttttctacaagaatcctgtctagtaaataggatcatttattgggcagttgggaaatcagctctctgtcctgttgagtgttttcagcagctgctcctaaaccagtcctcctgccagaaaggaccagtgccgtcacatcgctgtctctgattgtccccggcaccagcaggcccttggggggctcacctgaaggctcgaaggcactgcacacttgtatattgtcagtgaagaactgttagttggttgtcagtgaacaataactttattatatgagtttttgtagcatcttaagaattatacatatgtttgaaatattgaaactaagctacggtaccagtaattagatgtagaatcttgtttgtaggctgaattttaatctgtatttattgtcttttgtatctcagaaattagaaacttgctacagacttacccgtaatatttgtcaagatcatagctgactttaaaaacagttgtaataaactttttgatgctagctgtttactggtttttgtttttgatgtcataaatagaccttgtttaatagtcacaagccgttgggatatcatacccagctgaaaaagaacaaactgcttaacataagtatatgtatcgtaataagagttttttaccagctaagtgattcaatgtaagtggtttttaaaataaaatactgtagagatcatggtgaaaaaaaaaaaaaa

SEQ ID NO: 473 - DNA, 5628 bp, Homo sapiens
cgatcagctgttgcgagcgctgcacaacaacaaaaggacttggactggccggcctgggcgcagcgacccgagggctggagccggccccgcgcctgccgtctgggtacctgaacgaggtgcagcgcagcccggccccaccgcagctacctcagcagtcccgccccgcccgcgtccttccccgccgagccggcggccgctcccttccccgcgcagccccgcacggcccgggcccacgtacaatgactcttcttgcttttcacctaagttgaataagcaccctgtgcactttaatctcctgtcggtaccattgggccaactaaagacaaggttttgaaatctcagctataaaagacatccagccaaactctcagtcttgccttaacaatgttccagaggctgaataaaatgtttgtgggtgaagtcagttcttcctccaaccaagaaccagaattcaatgagaaagaagatgatgaatggattcttgttgacttcatagatacttgcactggtttctcagcagaagaagaagaagaagaggaggacatcagtgaagagtcacctactgagcacccttcagtcttttcctgtttaccggcatctcttgagtgcttggctgatacaagtgattcctgctttctccagtttgagtcatgtccaatggaggagagctggtttatcaccccacccccatgttttactgcaggtggattaaccactatcaaggtggaaacaagtcctatggaaaaccttctcattgaacatcccagcatgtctgtctatgctgtgcataactcctgccctggtctcagtgaggccacccgtgggactgatgaattacatagcccaagtagtcccagagtggaagctcaaaatgaaatggggcagcatattcattgttatgttgcagctcttgctgctcatacaacttttctggaacaacccaagagctttcgcccttcccagtggataaaagaacacagtgaaagacagcctcttaacagaaatagccttcgtcgccaaaatcttaccagggattgccaccctcggcaagtcaagcacaatggctgggttgttcatcagccctgcccgcgtcagtacaattactaatagtttcaagttttgttggttggtttctcttggtttgtgcttacatgtatggatgtgtgtatatgtacagtgaaaatgttgtctctttacaaccaattgataaccaatcacatagttttatcagtgtatttagacactatcttgaaaatcagatttatatgctgtgtatcacataatgccttgcctttaacatttactttttttgtacactttttcagattatttctggaaacatatcaatataattacagtgtttgggggtgtctttaaatatattaggttatacattagtcagcattttaaagacatttcttcccaagtacgagaataggcatctttcattttcattttattttgtattacttaatcttttaagcaagcaaaaatttattctcagggtcagctgtacactttattgaccagtacttgataatctctctgtatatgatgaatacatttttacacactaacattagcattaacaggtgatagttgccatggatataatggaattatggctggactttcttttgaaagaaaacttgatgtattctgtgtgtatggtttttccccagattagtcatacagttcatttggaattcaggtacattaagctttagtgaagagtgcatgcagtaattccaatgtgactgcatgacgtggtacagacattacaggtgttgtagacagaggcacttgtctcgtgcagagggattaaattagacctgtgagattatatttggaaaaattcatgtctgtaactaacccattagtgcagtatttaatttgttactattccttcccgccaattctgtccactcctcacctcgcatcagctataaatttggaagtacttgtccaggcactcaagtgacttcatatttctctctgcccatgggaaaagagataggctttatatttccacagagtgaaaaatcctctgtcatggagcctgtcctgccaagtggcaagagtgtggggactgtctggtgatgatgtctttcatggcatctgagtgaagagtgacaggttggctcaacttttttctttttttttttttaattgccttgtattgtaagtattcttccctgcagtccaagtgacttttcattttttgttttaacttcaggcaaaatctttaaccactctggcctctgtttcccccaccaacggggagcagtgacatttacctccctcacagagtcactgtgaggattctatactgatttgaagtggagctgttcagaactgaaccttgtaggaaattccaagggcctttctactgaatctggtgatggggtggggccgtggcactttctctgccacagctgttcttcacagtgttggtgctaatgaggccagggtgcagggttcgattcacacgtaggccagttaacttagagaaaatctatttccttacctctagccagtcacttcctttttccgcagttgtgatgggttttgctgagccatccactctgactgatttcctctgaagtaaacatatttacaatccaaagcaattctactgacagaagtgttgccttcataatcaaacagcttgtttttccatctcctctgcaaccctaattaaatgagtacaggtctacaaaatgttttcaaggagaaaagcagcatatccttaagtgaagtattatatttttcaataaccctgtagtggcttgatgcagggaaccctgggggactttcagcgaagagctgtgctcttttctgactagattagagcgtttggagtggaagacgtcaaatgtgtagtgagatggaggttttacattgttcttctactggctgtgatgaagtgccagaatgtctctttagaacaagagttagattccccctttctccttattgccccttccgttttgacttcccctttatttatttgttgtctaattaggggccaagtctgtaaagttttgtcaaagtgagttagaagttgttttctcttactatttgtgtttaccagagttgggagataagatagtttccatgaaggtgtgtatgttttatacgatgtttgttatagggccatgcattggtaacttgaaaatagaccagcttaatgtcttcaggatgtaaaactctgaatacacggcgtctctttttcatacattgcatgtaagttgttagtacctcacaagctacagaagttcagccatgagattttgtttggcaacatgaacagatttgtgtataactgcaatggcctttttttccagatttccttattgactttttgtttgccttacctggggctagttttttatgctttgtacctagaaaacaaaaaattacattcgttgggctttttttcaaggttgggattaccacaccacctggaatatcatactgtggtttctgcctaaaattggcacatgtaagtattgaagaaaatggttatataattcagttgaaactcttggttattagatgttaggcatctcctgtatgtaagacacaaggccaaccacaacacagaacgatgttgacctgttaagtattctctgaaacatggccaaaatgcattttatgagcttttttttttgctattgtaaatattagtggtttacaatgcgctttagacatatttctttaaaatgcaagcagtgagaaataagacctctctgaattagtagctctaaactgttaacatagaatgttacttggaaaaagtctggaatatgtggtgtacacaagcagtgcttcgtgaatgagtttcttagcttttatagtgcgccatgtttctcaaagtttgtttttgttgacaaaacattttataatatatatcttatgtttattttttttctcaactaattgtgtactgcactgtaaggtgaaaattagccatccattatttatcttctgtggcaatgcatttatatggttgattgggtggggaattttttgcagaaagatgcaaagtgattgggttttcgacttcctatcgcagggagcttttaagaaatattaatttcctatacatttttccaatccccatgcaaactgttcctgtttacataccttctctgttgtatcagtactttgagtgagaagacagtttatttaaaacttgagcaggctgttcagcattgtttctgcttctgaaatctgtatagtacactggtttgtaatcattatgtcttcattgaaatccttgctacttctcttcctcctcaatgaaatacattatatattatctttatgtactcttaagaaaaacgagcaaggaagagtatcttcattattctcattttctctgagttggaaacaaaaacatgaaggactccaactagaagacagatatttacatttaaatagattagtgggaaaactttaagagtttccacatattagttttcattttttgagtcaagagactgctccttgtactgggagacactagtagtatatgtttgtaatgttactttaaaattatctttttattttataaggcccataaatactggttaaactctgttaaaagtgggccttctatcttggatggtttcactgccatcagccatgctgatatattagaaatggcatccctatctacttactttaatgcttaaaattatacataaaatgctttatttagaaaacctacatgatacagtggtgtcagccttgccatgtatcagtttcacttgaaatttgagaccaattaaatttcaactgtttagggtggagaaagaggtactggaaaacatgcagatgaggatatcttttatgtgcaacagtatcctttgcatgggaggagagttactcttgaaaggcaggcagcttaagtggacaatgttttgtatatagttgagaattttacgacacttttaaaaattgtgtaattgttaaatgtccagttttgctctgttttgcctgaagttttagtatttgttttctaggtggacctctgaaaaccaaaccagtacctggggaggttagatgtgtgtttcaggcttggagtgtatgagtggttttgcttgtattttcctccagagattttgaactttaataattgcgtgtgttttttttttttttaagtggctttgtttttttttctcaagtaaaattgtgaacatatttcctttataggggcagggcatgagttagggagactgaagagtattgtagactgtacatgtgccttcttaatgtgtttctcgacacattttttttcagtaacttgaaaattcaaaagggacatttggttaggttactgtacatcaatctatgcataaatggcagcttgttttcttgagccacggtctaaattttgtttttatagaaattttttatactgattggttcatagatggtcagttttgtacacagactgaacaatacagcactttgccaaaaatgagtgtagcattgtttaaacattgtgtgttaacacctgttctttgtaattgggttgtggtgcattttgcactacctggagttacagttttcaatctgtcagtaaataaagtgtcctttaacttcaaaaaaaaaaaaaaa

SEQ ID NO: 474 - DNA, 5777 bp, Homo sapiens
aaggaggagtgcactggccgggatcggtgcagcgctcacactcactcacagtcactctctctgagcgcgtctcgctcgctctcatacacgcccggagcccaggagcgctcaggatcccgagcgccgcgaaaaagttcccccggcttttgctggagactcatcgctttgggaagtgcatttgcttcgtggctccgccgagcctgctgaatcctgtcctcgcggctcgggaccccgggatcgctgaccgctgccgccgccgcctctgcctcccggactatcggcagcctcggcaacaatagtggcggccgcccccagcgaggctccgggagcccttgcctgcgggggtccggggactcgagccggcctccgcctcccggacgcacagccagcgtggtccccgcgtgcaacgcgagcgccggggagtggctcctgctttgcccctcgtgggggccgagccaagaccagtctgcaaactccatcccgccggctggaagaagtcgcggagccggcaccaaacccgcagcgtcttcccgcgcggatcccgggacttaaaaagccggggccaccccggcccaggacgggatgcgggtcggtccggtgcgctctgccatgagcggcgcctcgcagccccgcggcccggccctgctcttcccagccacccgaggcgtcccggccaaacgcctgctggacgccgacgacgcggcggctgtggcggccaagtgcccgcgcctctccgagtgctccagccccccggactacctcagcccccccggctcgccctgcagcccgcagcccccgcctgccgctccgggggccggcggaggctccgggagcgcgccggggcccagccgcatcgccgactacctgctgctgcccctagccgagcgcgagcatgtgtcccgggcgctgtgcatccacactggacgcgagctgcgctgcaaggtgtttcccattaaacactaccaggacaaaatcaggccttacatccagctgccatcgcacagcaacattactggcattgtggaagtgatccttggggaaaccaaggcctatgtcttctttgagaaggactttggggacatgcactcctatgtgcgaagccggaagaggctgcgggaagaggaagccgcccggctcttcaagcagattgtctccgccgtcgcccactgccaccagtcagccatcgtgctgggggacctgaagcttaggaagttcgtcttctccacggaggagagaacccagcttagactagaaagtctagaagacacacacataatgaagggggaagatgatgctttgtcagacaaacatggctgcccagcctacgtgagccctgagatcctcaacaccactgggacctactccggaaaggctgcggacgtttggagcctgggggtgatgctctacacccttctggttggacgataccccttccatgactcagaccccagtgcccttttctccaaaattcggcgtggacagttctgcattcctgagcacatttcccccaaagccaggtgcctcattcgcagcctcttgagacgggagccctccgagagactcactgcccccgagatcctactgcacccctggtttgagtccgtcttggaacccgggtacatcgactcagaaataggaacttcagaccagattgttccagagtaccaggaggacagtgacattagttccttcttctgctaatccccaaaacctcagaaacctcataattcttaacacctggcatttccatttctaaagatggacaggccctttggcgtggtaccaaccagataatgactgcatcaggatgaaagctgctgaactcggcatggcgcctcctcttctctgttgggatgagtgactttattgatttgagcagcatatgctgtgattggctgccctgcaaatttgtttcccttaaggaaccctcaccaactatctctgctggatttgggagttccgcatcttttgtggagggcagagtatggacatcttacacccggtggtcaagtgtgtaataaacttgagcattcgaatgggagaaaaagcaaatcgcacaatgacatattttgagtaataaccgtatttttcacagggtgacaaattgggccaataaatctgccatctttgaactcatctttggtggctagactgctacggcagcttctctgatgggaaagttccttttttggcttaacactcaccctttcttcacactcacatttaccaatgactctgctccgtttttggagcagactgttttaagttgctcaggagcctgatggaaccatgaaccgagactcttctctgtttcctgccaagacctcatctgcactaatgccttctccctgaccttgacacttccccctttagctataaaagcacttaccagccgaacgtggaacagtatcacaaaagattccatctcccaacgatttcagaactctgagctcagagagactccagattttaaaaaataatttgagtgcttggaaactattagctttttaagttccttccaaatatgttagtacctaccctttactttttccccaagaccatctcagggtggagcattctgtctaagagaagaaagataaggaggctcccacccacctctcccaagagcagacattaaacatctttgtgctttgaagagagtgaattttggatagtcttgtgattctcagactaacttccagaattatactttaacccctcccagatatggtccgcctttggcattgtgtgtacatctgcagttttgcatggtgggttgttaatatttcaaatgtgtggtttatgaatacgtctgtataatcggcttctggagtgaaacagcaaaccccaaatcttcaaagttggaaggaactttaaaaatcatccggtccaatctctttcctctttctgccacctcccaaggcagaaatcccctcttcagcttcttttgtaggtgggaatccagcctctgttagatatgtccagagatggaaactcactcccctacaaaagatggagcttaatggagaaattgcaactttcattaaaaaacaaattcagatgaaatatcagtaactgtcttggacagtgctgaaatcaggtggttaaacgggtaaacaaaatatactgtattttgagaaatggcacaaaaacaggcagtcatctttaagggctatgcctaggcaaactactaacatgcattgtgagaatgccgtgtatacctcacgtactgtgtactttgtacatatattttaccttttatacctatgttcgattttgttttgttttgttttgttctggctttgaggcttgttttgttgtctgtgtctgtctgaataacctgcgtgtctaaaaccacgtgaaatgtgaatgattattggcaatattaccttgacagaatcatgggactttgagaagagggaggacagaggcctctgtcgcactaacgctctcgtggttgctcgactgttgtatctgtgatacattatccgactaaggactctgggctggcagggccttctgccgggaaagctagaaacactaggttcttcctgtacatacgtgtatatatgtgaacagtgagatggccgtttctgacttgtagagaaattttaataaacctggtttcgtaaataaaaaaaaaaaaaaaggttccagtagttggtatggtccgagacagtatggctgctgcatttcggccctcgaatcgagttctcctgcaggcgctgcagattttggtgtatcctggggtgggaggctccggctctgtcagctgccgctgccctctcggagctaaaagatacctacttacagataatgtggtgaaattaaaagaatttcaacaaaagaaagtggctgttgcatgtaatctttctggcactaaagaaacgtattttagaaacttgaaaaagaaactgacccagaacaagctcatcttgaagggggagttgataaccttactacatttgtgtgagtctcgggaccatgtggaactggctaaaaatgtcatttacaggtaccatgcagagaacaaaaatttcactttgggggagtataaatttggaccgctttttgtgaggttgtgttacgagttggatctcgaggaatctgcagtggagctcatgaaagaccagcatttacgaggtttcttctcagactccacatcattcaatattttgatggatatgttatttatcaaaggcaaatataaaagtgctttgcaagtattgatagagatgaaaaaccaagatgtgaagttcaccaaagatacctatgttcttgcttttgcaatttgctacaaactgaatagccctgagtctttcaaaatctgtactacattaagagaagaagctctactcaaaggagaaattctctccaggagagcatcctgtttcgctgtggcattagctctgaatcagaatgagatggcaaaagctgtgtccattttttctcaaatcatgaatccagaaagcatagcctgcattaatttaaatattataatccatatccagtcaaatatgttggaaaacctgataaagactctaaaaaatgctgcagaaggaaatttatcaaaatttgtgaaaagacatgtgttctcggaggaagtgctggccaaagtgagggaaaaagtgaaggatgtgcctgcccttgtggccaaatttgatgagatctatgggacactgcacatcactggccaggtcaccactgattctttggatgctgtgctctgccacacccccagggacaggaaatctcacacgttgctattaaacaagaggatggtcagccgtcgcaccttccagccactcagccagtccctgttggctgagtaaccctggtttcagtccacctatggatctgaggggcctgcttctagtgagttattacctttcctaagaagccaggtatcgcacttcagcagacagtgtgctgacacttggtcttctcctgaaattcccaaattcactgaatggtaccatgccgatctctgagaagttatgttgcaccactgtgaaggtctagatgcaagcttggctccctcagaaaggcgcttcccttttgcatggctgaggatccttgaaggaacctggtcagtctccggttcagcttccgacaccagagtggaacccagtaagcaccatcaggaatgaatttcactacaagtgtggataactctgattttcaaaggagtagttacttgcaaattacatccttgctgaattcaggaggtatgaaaccctattttaccatgttagaaaacagcccaggattttctcattgctctgccatcatatatgtctatgacttgagcccttatttttccatctgcaaaacaataatgcctatgtgtctttgcatatagatttgaaatcttcattcaaggtttagtaggatcatattttctcaaaaataagagaaataaggttcataaggaaacttgctgggattgtggttgttttgttttctcagcagcacaaacaaaaccagaatttagcctttaggactgctgagtaagccaaatttaaatgactactgctttgttcatgggtaagccatgtgcttttcaaaataagtgccactaaaaaccacataatgctttggtttctatgtggataataaatatttagtcctatagtttatcttatttgttaatgatttttctctcttgaatgcctcatattaaaaaaaaatgtgccatgagagcagttcaaagctgcttcatacttatggtctcaaatatagtatgtgttgaattttaaaaaaaaaaaaaaaaaaaa

SEQ ID NO: 475 - DNA, 10244 bp, Homo sapiens
gcagccatgagcggcagcagcggcggagccgccgcccccgccgcgtcctccggccccgccgcggcggccagcgcggctggctcgggctgcgggggcggtgccggcgagggggcagaggaggcggccaaggacctggccgacatcgcggccttcttccgatccgggtttcgaaaaaacgatgaaatgaaagctatggatgttttaccaattttgaaggaaaaagttgcatacctttcaggtgggagagataaacgtggaggtcccattttaacgtttccggcccgcagcaatcatgacagaatacgacaggaggatctcaggagactcatttcctatctagcctgtattcccagcgaggaggtctgcaagcgtggcttcacggtgatcgtggacatgcgtgggtccaagtgggactccatcaagccccttctgaagatcctgcaggagtccttcccctgctgcatccatgtggccctgatcatcaagccagacaacttctggcagaaacagaggactaattttggcagttctaaatttgaatttgagacaaatatggtctctttagaaggccttaccaaagtagttgatccttctcagctaactcctgagtttgatggctgcctggaatacaaccacgaagaatggattgaaatcagagttgcttttgaagactacattagcaatgccacccacatgctgtctcggctggaggaacttcaggacatcctagctaagaaggagctgcctcaggatttagagggggctcggaatatgatcgaggaacattctcagctgaagaagaaggtgattaaggcccccatcgaggacctggatttggagggacagaagctgcttcagaggatacagagcagtgaaagctttcccaaaaagaactcaggctcaggcaatgcggacctgcagaacctcttgcccaaggtgtccaccatgctggaccggctgcactcgacacggcagcatctgcaccagatgtggcatgtgaggaagctgaagctggaccagtgcttccagctgaggctgtttgaacaggatgctgagaagatgtttgactggatcacacacaacaaaggcctgtttctaaacagctacacagagattgggaccagccaccctcatgccatggagcttcagacgcagcacaatcactttgccatgaactgtatgaacgtgtatgtaaatataaaccgcatcatgtcggtggccaatcgtctggtggagtctggccactatgcctcgcagcagatcaggcagatcgcgagtcagctggagcaggagtggaaggcgtttgcggcagccctggatgagcggagcaccttgctggacatgtcctccattttccaccagaaggccgaaaagtatatgagcaacgtggattcatggtgtaaagcttgcggtgaggtagaccttccctcagagctgcaggacctagaagatgccattcatcaccaccagggaatatatgaacatatcactcttgcttattctgaggtcagccaagatgggaagtcgctccttgacaagctccagcggcccttgactcccggcagctccgattccctgacagcctctgccaactactccaaggccgtgcaccatgtcctggatgtcatccacgaggtgctgcaccaccagcggcagctggagaacatctggcaacaccgcaaggtccggctgcatcagaggctgcagctgtgtgttttccagcaggacgttcagcaggtgctagactggatcgagaaccacggagaagcatttctgagcaaacatacaggtgtggggaaatctcttcatcgggccagagcattgcagaaacgtcatgaagattttgaagaagtggcacagaacacatacaccaatgcggataaattactggaagcagcagaacagctggctcagactggggaatgtgaccccgaagagatttatcaggctgcccatcagctggaagaccggattcaagatttcgttcggcgtgttgagcagcgaaagatcctactggacatgtcagtgtcctttcacacccatgtgaaagagctgtggacgtggctggaggagctgcagaaggagctgctggacgacgtgtatgccgagtcggtggaggccgtgcaggacctcatcaagcgctttggccagcagcagcagaccaccctgcaggtgactgtcaacgtgatcaaggaaggggaggacctcatccagcagctcagggactctgccatctccagtaacaagaccccccacaacagctccatcaaccacattgagacggtgctgcagcagctggacgaggcgcagtcgcagatggaggagctcttccaggagcgcaagatcaagctggagctcttcctgcagctgcgcatcttcgagagggacgccatcgacattatctcagacctcgagtcttggaatgatgagctttctcagcaaatgaatgacttcgacacagaagatctcacgattgcagagcagcgcctccagcaccatgcagacaaagccttgaccatgaacaacttgacttttgacgtcatccaccaagggcaagatcttctgcagtatgtcaatgaggtccaggcctctggtgtggagctgctgtgtgatagagatgtagacatggcaactcgggtccaggacctgctggagtttcttcatgaaaaacagcaggaattggatttagccgcagagcagcatcggaaacacctggagcagtgcgtgcagctgcgccacctgcaggcagaagtgaaacaggtgctgggttggatccgcaacggagagtccatgttaaatgccggacttatcacagccagctcgttacaagaggcagagcagctccagcgagagcacgagcagttccagcatgccattgagaaaacacatcagagcgcgctgcaggtgcagcagaaggcagaagccatgctacaggccaaccactacgacatggacatgatccgggactgcgccgagaaggtggcgtctcactggcaacagctcatgctcaagatggaagatcgcctcaagctcgtcaacgcctctgtcgctttctacaaaacctcagagcaggtctgcagcgtcctcgagagcctggaacaggagtacaagagagaagaagactggtgtggcggggcggataagctgggcccaaactctgagacggaccacgtgacgcccatgatcagcaagcacctggagcagaaggaggcattcctgaaggcttgcacccttgctcggaggaatgcagacgtcttcctgaaatacctgcacaggaacagcgtgaacatgccaggaatggtgacgcacatcaaagctcctgaacagcaagtgaaaaatatcttgaatgaactcttccaacgggagaacagggtattgcattactggaccatgaggaagagacggctggaccagtgtcagcagtacgtggtctttgagaggagtgccaagcaggctttggaatggatccatgacaatggcgagttctacctttccacacacacctccacgggctccagtatacagcacacccaggagctcctgaaagagcacgaggagttccagataactgcaaagcaaaccaaagagagagtgaagctattgatacagctggctgatggcttttgtgaaaaagggcatgcccatgcggcagagataaaaaaatgtgttactgctgtggataagaggtacagagatttctctctgcggatggagaagtacaggacctctttggaaaaagccctggggatttcttcagattccaacaaatcgagtaaaagtctccagctagatatcattccagccagtatccctggctcagaggtgaaacttcgagatgctgctcatgaacttaatgaagagaagcggaaatctgcccgcaggaaagagttcataatggctgagctcattcaaactgaaaaggcttatgtaagagacctccgggaatgtatggatacgtacctgtgggaaatgaccagtggcgtggaagagattccacctggcattgtaaacaaagaactcatcatcttcggaaacatgcaagaaatctacgaatttcataataacatattcctaaaggagctggaaaaatatgaacagttgccagaggatgttggacattgttttgttacttgggcagacaagtttcagatgtatgtcacatattgcaaaaataagcctgattctactcagctgatattggaacatgcagggtcctattttgacgagatacagcagcgacatggattagccaattccatttcttcctaccttattaaaccagttcagcgaataacgaagtatcagctccttttaaaagagctgctgacgtgctgtgaggaaggaaagggagagattaaagatggcctggaggtgatgctcagcgtgccgaagcgagccaatgatgccatgcacctcagcatgctggaagggtttgatgaaaacattgagtctcagggagaactcatcctacaggaatccttccaagtgtgggacccaaaaaccttaattcgaaagggtcgagaacggcatctcttcctttttgaaatgtccttagtatttagtaaagaagtgaaagattccagtgggagaagcaagtacctttataaaagcaaattgtttacctcagagttgggtgtcacagaacatgttgaaggagacccttgcaaatttgcactgtgggtggggagaacaccaacttcagataataaaattgtccttaaggcttccagcatagagaacaagcaggactggataaagcatatccgcgaagtcatccaggagcggacgatccacctgaagggagccctgaaggagcccattcacatccctaagaccgctcccgccacaagacagaagggaaggagggatggagaggatctggacagccaaggagacggcagcagccagcctgatacgatttccatcgcctcacggacgtctcagaacacgctggacagcgataagctctctggtggctgtgagctgacagtggtgatccatgacttcaccgcttgcaacagcaacgagctgaccatccgacggggccagaccgtggaagttctggagcggccgcatgacaagcctgactggtgtctggtgcggacaactgaccgctccccagcggcagaaggcctggtcccctgtggttcactgtgcatcgcccactccagaagtagcatggaaatggagggcatcttcaaccacaaagactcgctctccgtctccagcaatgacgccagtccacccgcatccgtggcttccctccagccccacatgatcggggcccagagctcgccgggccccaagcggccgggcaacaccctgcgcaagtggctcaccagccccgtgcggcggctcagcagcggcaaggccgacgggcacgtgaagaagctggcgcacaagcacaagaagagccgcgaggtccgcaagagcgccgacgccggctcgcagaaggactccgacgacagtgcggccaccccgcaggacgagacggtcgaggagagaggccggaacgagggcctgagcagcggtactctctccaaatcctcctcctcggggatgcagagctgtggagaagaggaaggcgaggagggggccgacgccgtgcccctgccgccacccatggccatccagcagcacagcctcctccagccagactcacaggatgacaaggcctcttctcggttattagtccgccccaccagctccgaaacaccgagtgcagccgagctcgtcagtgcaattgaggaactcgtgaaaagcaagatggcactggaggatcgccccagctcactccttgttgaccagggagatagtagcagcccttccttcaacccttcggataattcccttctctcttcctcctcgcccattgatgagatggaagaaaggaaatccagctctttaaagagaagacactacgttttgcaagaactagtggagacagagcgtgactatgtgcgggaccttggctatgtggttgagggctacatggcacttatgaaagaagatggtgttcctgatgacatgaaaggaaaagacaaaattgtgttcggcaacatccatcagatttacgactggcacagagacttttttttaggagagttagagaagtgccttgaagatccagaaaaactaggatccctttttgttaaacacgagagaaggttgcacatgtacatagcttattgtcaaaataaaccaaagtctgagcacattgtctcagaatacattgataccttttttgaggacttaaagcagcgtcttggccacaggttacagctcacagatctgttgatcaaaccagtgcagagaatcatgaagtatcagctgttactgaaggacttcctcaagtattccaaaaaggccagcctggatacatcagaattagagagagctgtggaagtcatgtgcatagtacccaggcggtgcaacgacatgatgaacgtggggcggctgcaaggattcgacgggaaaatcgttgcccagggtaaactgctcttgcaggacacattcttggtcacagaccaagatgcaggacttctgcctcgctgcagagagaggcgcatcttcctctttgagcagatcgtcatattcagcgaaccacttgataaaaagaagggcttctccatgccgggattcctgtttaagaacagtatcaaggtgagttgcctttgcctggaggaaaatgtggaaaatgatccctgtaaatttgctctgacatcgaggacgggtgacgtggtagagaccttcattttgcattcatctagtccaagtgtccggcaaacttggatccatgaaatcaaccaaattttagaaaaccagcgcaattttttaaatgccttgacatcgccaatcgagtaccagaggaaccacagcgggggcggcggcggcggcggcagcgggggcagcggcgggggtgggggcagcggcggcggcggggcccccagtggcggcagcggccacagtggcggccccagcagctgcggcggcgcccccagcacgagcaggagccggccctcccggatcccccagcctgtccgacaccacccccccgtgctggtctcctctgcagcctcgagccaggcagaggcagacaagatgtcaggtacgtccacccccgggccctccctgcctccccctggcgcggcccccgaggccggccccagcgcgcccagcaggcggccccccggcgcggacgccgaggggtccgagcgagaagcggagccgatccccaagatgaaggtgctggagagccccaggaaaggcgccgcgaacgcctcggggtcgagcccagacgcccccgccaaggacgcgcgcgctagcctgggcaccctgccgcttgggaagccccgggccggggccgcttcgccgctgaactcgccgctctccagcgcggtcccttctctcggcaaggagcccttcccccccagcagccccctgcagaaggggggctccttctggagctccatccccgcctcccccgccagccgacccggctccttcaccttcccgggggacagcgactccctccagcggcagacaccccgccacgcggcccctggcaaggatactgaccgcatgagcacgtgctcctcggccagcgagcagtccgtgcagtccacccagagcaacgggagtgaaagcagcagcagtagcaacatctccaccatgttggtgacacacgattacacggcagtgaaggaggatgagatcaacgtctaccaaggagaggtcgttcaaattctggccagcaaccagcagaacatgtttctggtgttccgagccgccactgaccagtgccccgcagctgagggctggattccaggctttgtcctgggccacaccagtgcagtcatcgtggagaacccggacgggactctcaagaagtcaacatcttggcacacagcactccgtttaaggaaaaaatctgagaaaaaagataaagacggcaaaagggaaggcaagttagagaacggttatcggaagtcacgggaaggactcagcaacaaggtatctgtgaagcttctcaatcccaactacatttatgacgttcccccagaattcgtcattccattgagtgaggtcacgtgtgagacaggggagaccgttgttcttagatgtcgagtctgtggccgccccaaagcctcaattacctggaagggccctgaacacaacaccttgaacaacgatggtcactacagcatctcctacagtgacctgggagaggccacgctgaagattgtgggcgtgaccacggaagatgacggcatctacacgtgcatcgctgtcaatgacatgggttcagcctcatcgtcggccagcctgagggtcctaggtccagggatggatgggatcatggtgacctggaaagacaactttgactccttctacagtgaagtggctgagcttggcaggggcagattctctgtcgttaagaaatgtgatcagaaaggaaccaagcgagcagtggccactaagtttgtgaacaagaagttgatgaagcgcgaccaggtcacccatgagcttggcatcctgcagagcctccagcaccccctgcttgtcggcctcctcgacacctttgagacccccaccagctacatcctggtcttagaaatggctgaccagggtcgcctcctggactgcgtggtgcgatggggaagcctcactgaagggaagatcagggcgcacctgggggaggttctggaagctgtccggtacctgcacaactgcaggatagcacacctggacctaaagcctgagaatatcctggtggatgagagtttagccaagccaaccatcaaactggctgactttggagatgctgttcagctcaacacgacctactacatccaccagttactggggaaccctgaattcgcagcccctgaaatcatcctcgggaaccctgtctccctgacctcggatacgtggagtgttggagtgctcacatacgtacttcttagtggcgtgtcccccttcctggatgacagtgtggaagagacctgcctgaacatttgccgcttagactttagcttcccagatgactactttaaaggagtgagccagaaggccaaggagttcgtgtgcttcctcctgcaggaggaccccgccaagcgtccctcggctgcgctggccctccaggagcagtggctgcaggccggcaacggcagaagcacgggcgtcctcgacacgtccagactgacttccttcattgagcggcgcaaacaccagaatgatgttcgacctatccgtagcattaaaaactttctgcagagcaggcttctgcctagagtttgacctatccagaagttctttctcattctctttcacctgccaatcagctgttaatctgaattttcaagagaaaacaagcaaacataactgatcagctgccggtatgttcatcgtgtgaaattgcattccaagtgagctgtgctcagcagtgcttggacacagagctgcaagctgcgctggggtggaggaccgtcacttacactctgcccaaggcagaggtcgcattgctgtatcacagtattttattcaggtttctgcaaaaaaataaaaagataacttttttaaacaaacatgaatagaattttgcaaatttaacgttttcaagatttattcaaggaaacaaaatgcctatgttcaaccactggtgttaatgaacaaagatactgtgcgtctctggggaagacgcacctaggtggcggccactcccatggccttgtctaggactcagagaccactcggctctgagcttccaggcgcctcgtctgtgtgcatctcacgcccgacgtggcttctgaaacgtgcattcaacctcaaacttttgcataaaatagaatgaatcgttttgctctgatgaaatgtaggccttacttgtatataagactgttcctgccttcggtctgtcattttcccacctgcctcccctacccaccccccacccaccacctggggcttcctctgggggtccgagggtcttcccatcacatgaagacatcaggttgggtcctgccccactgcccctccccctgttcctgccccaagccgtcaatcagattgtggagcagtacacagtcagatgaaaatactgtaaatgcactcattgggggttttttggttttacttcatatcatgtgcaatgttgtggctttaacattttatgcaactatttatgaagacctctgttgtacctgtaataaatatatagaaaaagcaaaaaaaaaaaaaaaaaa

SEQ ID NO: 476 - DNA, 2312 bp, Homo sapiens
ctccacaggtccgccccaatccccgctcacacttgggaaacttgggactgcgctggggccgcgtgtggcacctcaggggggcggcccccggcctcaagaggagggggaggagaaggaggaagaggaggaagtgagcccgaaggatccgctcggagctgtttgtccagctgtttctattcgcacccggagcagtacagccagaagggggccgagccgaaggtggctggctttaggcgctaatttccaactcttttcctcacagcttgtcttttccaggcaccctggagtcccctcaggccagctcggtgggcgcgcacctgccagccgcccctgacctcgcaggccaggcgacctccgagcctgagaagatggcccagtccaagctcgattgccgctcacctgtcggcctcgactgctgcaactgctgcctggacctggcccatcggagtgggctccagcgaggcagcagcggggagaacaacaacccgggcagccctacagtgagcaactttcggcagctgcaggaaaagctggtctttgagaacctcaataccgacaagctcaacagcataatgcggcaggattcgctagagccggtgctgcgggacccctgctacctgatcaacgagggcatctgcaaccgcaacatcgaccagaccatgctctccatcctgctcttcttccacagtgcctccggagccagcgtggtggccatagacaacaagatcgaacaggccatggatctggtgaagaatcatctgatgtatgctgtgagagaggaggtggagatcctgaaggagcagatccgagagctggtggagaagaactcccagctagagcgtgagaacaccctgttgaagaccctggcaagcccagagcagctggagaagttccagtcctgtctgagccctgaagagccagctcccgaatccccacaagtgcccgaggcccctggtggttctgcggtgtaagtggctctgtcctcagggtgggcagagccactaaacttgttttacctagttctttccagtttgtttttggctccccaagcatcatctcacgaggagaactttacacctagcacagctggtgccaagagatgtcctaaggacatggccacctgggtccactccagcgacagacccctgacaagagcaggtctctggaggctgagttgcatggggcctagtaacaccaagccagtgagcctctaatgctactgcgccctgggggctcccagggcctgggcaacttagctgcaactggcaaaggagaagggtagtttgaggtgtgacaccagtttgctccagaaagtttaaggggtctgtttctcatctccatggacatcttcaacagcttcacctgacaacgactgttcctatgaagaagccacttgtgttttaagcagaggcaacctctctcttctcctctgtttcgtgaaggcaggggacacagatgggagagattgagccaagtcagccttctgttggttaatatggtataatgcatggctttgtgcacagcccagtgtgggattacagctttgggatgaccgcttacaaagttctgtttggttagtattggcatagtttttctatatagccataaatgcgtatatatacccatagggctagatctgtatcttagtgtagcgatgtatacatatacacatccacctacatgttgaagggcctaaccagccttgggagtattgactggtcccttacctcttatggctaagtctttgactgtgttcatttaccaagttgacccagtttgtcttttaggttaagtaagactcgagagtaaaggcaaggaggggggccagcctctgaatgcggccacggatgccttgctgctgcaaccctttccccagctgtccactgaaacgtgaagtcctgttttgaatgccaaacccaccattcactggtgctgactacatagaatggggttgagagaagatcagtttgggcttcacagtgtcatttgaaaacgttttttgttttgttttgtaattattgtggaaaactttcaagtgaacagaaggatggtgtcctactgtggatgagggatgaacaaggggatggctttgatccaatggagcctgggaggtgtgcccagaaagcttgtctgtagcgggttttgtgagagtgaacactttccactttttgacaccttatcctgatgtatggttccaggatttggattttgattttccaaatgtagcttgaaatttcaataaactttgctctgtttttctaaaaataaaaaaaaaaaaaaaaaaaaaaaaaaaaaaaaaaaaaaaaaaaaaa

SEQ ID NO: 477 - DNA, 2402 bp, Homo sapiens
aagaaaggtaagggccctgggcgaggaaagcgcggccctttccgagtttggtgttttgcagcgaaaggaaatctcgctcttccgaaagtcctccagggcgagagaggaaagggcctaggtactgtgctggggtcgcacagccggccgagacagtgccgggacggggagccaggcttccgagtgcgcccggtcactgactcctccgcgctttcctcgtgcgcctgcagcccttggttcttggaaacgccggcgccttgttcagggctggtggggctggggcgcaaggtgcagctgacaatgcccgagaggagccgcagcctctggtggagttcggtcgggtgtgggggtagtcaaggaaagaagcaaagggaatacctcctctgaaaaatggcagaagcagttttccatgccccaaagaggaaaagaagagtgtatgagacttacgagtctccattgccaatcccttttggtcaggaccatggtcctctgaaagaattcaagatattccgtgctgaaatgattaacaacaatgtgattgtgaggaatgcggaggacattgagcagctctatgggaaaggttattttggaaaaggtattctttcaagaagccgtccaagcttcacaatttcagatcctaaactggttgctaaatggaaagatatgaagacaaacatgcctatcatcacatcaaagaggtatcagcatagtgttgagtgggcagcagagctgatgcgtagacaggggcaggatgagagtacagtgcgcagaatcctcaaggattacacgaaaccgcttgagcatcctcctgtgaaaaggaatgaagaggctcaagtgcatgacaagcttaactctggaatggtttccaacatggaaggcacagcagggggagagagaccttctgtggtaaacggggactctggaaagtcaggtggtgtgggtgatccccgtgagccattaggctgcctgcaggagggctctggctgccacccaacaacagagagctttgagaaaagcgtgcgagaggatgcctcacctctgccccatgtctgttgctgcaaacaagatgctctcatcctccagcgtggccttcatcatgaagacggcagccagcacatcggcctcctgcatcctggggacagagggcctgaccatgagtacgtgctggtcgaggaagcggagtgtgccatgagcgagagggaggctgccccaaatgaggaattggtgcaaagaaacaggttaatatgcagaagaaatccatataggatctttgagtatttgcaactcagcctagaagaggcctttttcttggtctatgctctgggatgtttaagtatttactatgagaaggagcctttaacgatagtgaagctctggaaagctttcactgtagttcagcccacgttcagaaccacctacatggcctaccattactttcgaagcaagggctgggtgcccaaagtgggactcaagtacgggacagatttactgctatatcggaaaggccctccattttaccatgcaagttattctgtcattatcgagctagttgatgaccattttgaaggctctctccgcaggcctctcagttggaagtccctggctgccttgagcagagtttccgttaatgtctctaaggaacttatgctgtgctatttgattaaaccctctactatgactgacaaggaaatggagtcaccagaatgtatgaaaaggattaaagttcaggaggtgattctgagtcgatgggtttcttcacgagagaggagtgaccaagacgatctttaacaattcaacctcaaatttctaatttcaccaacaactatttattgagggctaggtaaaaagttctttttgttgtaatcgtccattaattcataagttttaaagggcatggtgctcccagcaccagaaaactatcagtgtttttaaagataaattacacaagggaggagaaagatccctgtgctaggactgcagattctatacttgcgttggcctctaactctccaatccagagcctcctgcctctggcgtcagtcttttccctcatccactcactggggagattggactagaggagtcctgagaggacacttccaacaagagacatttattctctgattttacctgaaaatggtagtagtttacatttatacagtacagtttatgaagcactttcatacgcaggcatctcttgttacctacatctaagctgttcccgaaagagtgttacagaacacaacagtattgtacaatattcgataagcatatcttcactgcacttgttataaaaatgagtggtgaaataatgtttggagacataatgaaagcgattaacatttggcaaaatataataaagcctttttgtaattggtgagaaagtcaaaaaaaaaaaaaaaaaa

SEQ ID NO: 478 - DNA, 2344 bp, Homo sapiens
cggccgcctccgcgtccgcgtcgtcgtctgtgctcccggcgctgacgtgtctgggcggtcggcttccactccttcaggcgtcggcagccactagtcgtggcgagaggggcggggtggccggggctggcgctccacttggcccccgctcccggcccgccccgccgccgcggccccccggatgagggtatatattcggagcgagcgcgggacgccgatgagtggccgcgcggaaggagctggagacggtcgtagctgcggtcgcgccgagaaaggtttacaggtacatacattacacccctatttctacaaagcttggctattagagcattatgaacattaatgacctcaaactcacgttgtccaaagctgggcaagagcacctactacgtttctggaatgagcttgaagaagcccaacaggtagaactttatgcagagctccaggccatgaactttgaggagctgaacttctttttccaaaaggccattgaaggttttaaccagtcttctcaccaaaagaatgtggatgcacgaatggaacctgtgcctcgagaggtattaggcagtgctacaagggatcaagatcagctccaggcctgggaaagtgaaggacttttccagatttctcagaataaagtagcagttcttcttctagctggtgggcaggggacaagactcggcgttgcatatcctaaggggatgtatgatgttggtttgccatcccgtaagacactttttcagattcaagcagagcgtatcctgaagctacagcaggttgctgaaaaatattatggcaacaaatgcattattccatggtatataatgaccagtggcagaacaatggaatctacaaaggagttcttcaccaagcacaagtactttggtttaaaaaaagagaatgtaatcttttttcagcaaggaatgctccccgccatgagttttgatgggaaaattattttggaagagaagaacaaagtttctatggctccagatgggaatggtggtctttatcgggcacttgcagcccagaatattgtggaggatatggagcaaagaggcatttggagcattcatgtctattgtgttgacaacatattagtaaaagtggcagacccacggttcattggattttgcattcagaaaggagcagactgtggagcaaaggtggtagagaaaacgaaccctacagaaccagttggagtggtttgccgagtggatggagtttaccaggtggtagaatatagtgagatttccctggcaacagctcaaaaacgaagctcagacggacgactgctgttcaatgcggggaacattgccaaccatttcttcactgtaccatttctgagagatgttgtcaatgtttatgaacctcagttgcagcaccatgtggctcaaaagaagattccttatgtggatacccaaggacagttaattaagccagacaaacccaatggaataaagatggaaaaatttgtctttgacatcttccagtttgcaaagaagtttgtggtatatgaagtattgcgagaagatgagttttccccactaaagaatgctgatagtcagaatgggaaagacaaccctactactgcaaggcatgctttgatgtcccttcatcattgctgggtcctcaatgcagggggccatttcatagatgaaaatggctctcgccttccagcaattccccgcttgaaggatgccaatgatgtaccaatccaatgtgaaatctctcctcttatctcctatgctggagaaggattagaaagttatgtggcagataaagaattccatgcacctctaatcatcgatgagaatggagttcatgagctggtgaaaaatggtatttgaaccagataccaagttttgtttgccacgataggaatagcttttatttttgatagaccaactgtgaacctacaagacgtcttggacaactgaagtttaaatatccacagggttttattttgcttgttgaactcttagagctattgcaaacttcccaagatccagatgactgaatttcagatagcatttttatgattcccaactcattgaaggtcttatttatataattttttccaagccaaggagaccattggccatccaggaaatttcgtacagctgaaatataggcaggatgttcaacatcagtttacttgcagctggaagcatttgtttttgaagttgtacatagtaataatatgtcattgtacatgttgaaaggtttctatggtactaaaagtttgttttattttatcaaacattaagcttttttaagaaaataattgggcagtgaaataaatgtatcttcttgtctctggagtgtcaaaaaaaaaaaaaaaaaa

SEQ ID NO: 479 - DNA, 7933 bp, Homo sapiens
gctcgctggcgccgccgccgccggcagaccccgcgctccggctccggctcggctcgctcggctccggtgcgcgccgaggccatgcagcgccggggcgccctgttcggcatgccgggcggcagcggaggcaggaagatggctgcaggagacatcggcgagctgctagtgccccacatgcccacgatccgcgtgcccaggtccggcgacagggtctacaagaacgagtgcgccttctcctacgactctcccaattctgaaggtggactctatgtatgcatgaatacatttttggcctttggaagggaacatgttgaaagacattttcgaaaaactggacagagtgtatacatgcacctgaaaagacatgtgcgagagaaggtaagaggggcgtctggtggagcgttaccaaaaaggaggaattccaagatttttttagatctagatactgatgacgatttaaatagcgacgattatgaatatgaagatgaagccaaacttgttatattcccagatcactatgaaatagcactaccaaatattgaggagttaccagccctggtaacaattgcttgtgatgcagttctcagctcaaaatctccatacagaaagcaggacccagacacgtgggaaaatgaattgccagtatctaaatatgccaacaacctcacccagctggacaatggagtcaggattcctccaagtggttggaagtgtgccagatgcgacctgcgagaaaacctctggttgaatctgactgacggctctgtcctgtgtggaaagtggttctttgacagctctgggggcaacgggcatgcgctggagcattacagagacatgggctacccactagccgtgaaactgggaaccatcactcctgacggggcagatgtttattcttttcaagaagaagaacctgttttggatcctcatttggccaagcacttagcgcattttggaattgatatgcttcatatgcatgggacagagaatgggctccaggacaatgacatcaagctgagggtcagtgagtgggaagtgatccaggagtcgggcacgaaactgaagccaatgtatggtcctggctacacgggtctgaagaacctgggcaacagctgctatctcagctctgtcatgcaggccatcttcagcatcccagaattccagagagcgtatgtaggaaaccttcccagaatatttgactactcgcctttagatccaacacaagatttcaacacacagatgactaagttaggacatggccttctctcaggccagtattcaaagcctccggtgaaatctgaactcattgaacaggtgatgaaggaggagcacaagccacagcagaacgggatctctccgcgcatgtttaaggcctttgtaagcaagagccacccggaattctcctctaacaggcagcaagatgcccaggaattcttcttgcacctggtgaatctagtagagaggaaccgcatcggctcagaaaacccaagcgatgtttttcgttttttggtggaagaacgcattcagtgctgtcagacccggaaagtccgctacacggagagggtggattacctgatgcagttacctgtggccatggaggcggcaaccaacaaggatgaactgatcgcttatgaactaacgagaagggaagcagaagcaaacagaagaccccttcctgagttggtacgtgccaagataccatttagtgcctgccttcaggccttctctgaaccagaaaatgttgatgatttctggagcagtgccctacaagcaaagtctgcgggtgtgaaaacatctcgctttgcttcattccctgaatacttggtagtgcagataaagaagttcacttttggtcttgactgggttcccaaaaaatttgatgtttctattgatatgccagacctacttgatatcaaccatctccgagccagggggttacagccaggagaggaagaacttccagacatcagcccccccatagtcattcctgatgactcaaaagatcgcctgatgaaccaattgatagacccatcagacatcgatgagtcatcagtgatgcagctggccgagatgggtttcccgctggaagcatgtcgcaaggctgtgtacttcactggaaatatgggcgccgaggtggccttcaactggatcattgttcacatggaagagccagattttgctgagccgctgaccatgcctggttatggaggggcagcttctgctggagcctctgtttttggtgcttctggactggataaccaacctccagaggaaatcgtagctatcatcacctccatgggatttcagcgaaatcaggctattcaggcactacgagcaacgaataataacctggaaagagcactggattggatctttagccaccctgagtttgaagaagacagtgattttgtgattgagatggagaataatgccaatgcaaacattatttctgaggccaagcccgaaggacctagagtcaaggatggatctggaacatatgagctatttgcattcatcagtcacatgggaacatccacaatgagtggtcattacatttgccatatcaaaaaggaaggaagatgggtgatttacaatgaccacaaagtttgtgcctcagaaaggccccctaaagacctgggctacatgtacttttaccgcaggataccaagctaaacctcaaatataaaaattggcgaaaagaagccatacgcctttttaatttgccaaaaaaaaaaagaagaagaagaagttgaaacaactagacatgaaggaatatatggggtatttatcgtttatttaaagagcacgatcagttgacaccttctgaaatagaactgagaagaaatttctattagtgatgatacactattatattgtagatagtttttataaatgttcaaaaagatgatgatatttaaaaacaaaaaaagtattcatattgctggtggaggatctgccatcagcacatcaaaaatggggatgtgcccccagccctctattttgctttgggggtcagtgatagtggcctctggagaaaccaaataatgtggccagtggtgtggccttacccacaacaaatgaaaagcccacttgtgtttcatatagaaaatcagcagttgggtggggctttatttgtgacataatttttttcatgacatacaataatttctgatgtatccatgtagatattatgctctgtccataatagagcctctgcaatgaaagatatttttaatttgtcacattaaaattcataatacgattgtgtgaatgtgtgtgagactgactgagagtgtgagacttttactagaaaagtgagtccactagaaaatctgtgacaagttggtttttaaagtctgaacagttgatattaagcatatctgaaaaaagcaagtaaatattttaacaaaactatgactcaggaaccttcgagaagattagttccccacttagatttttaaggagtaaaaagggctgagttatgcctttaagtgctgtcaagaattcacttgggtttgggacatttgctggtgtaatgctagatgcccacagcagcataatattgtactttgtcaaaggtaggtaaattctctgtttctcagcagccctttccccaaaaggtatggtgtttatttttagtaaaaatagctaatctctttttaccatctcacatgataactctttggagtcatgtcaagtgccccaaatttgtctgtgattttcccatctctgagctctttatctgcctccgtttccttgtttttctggggccagagtctcatctctgcctttttttggtgtatcaccttctgacttgccttcattgcttgtctgatgtgaccaacagtgtgatcttggacacactaaggattttagatgcaaagaaactttatacaacattatgaaagactatcctttccattttggttatttcagcattttagttgcaacctgggattagattagagtttccaacgtgatgaaaagtggaatgatagcattctataatttccataattttcctactggtccgtaccaaattctagagtctctggagttgctatttcagagtatttggtcaaacgaaaaagaatttattgctgtctgtttaacatgtatttgtttggttgaaaggatctttttagaaactgtaggaaaataaacagaaccaaccaggtgaaacaaagcacagacattgggttaggatgtagtgagttgtgaacaatcaggattctgggtgtgatgggggtccctgtctcataggtgatcctttggtgccatgtgaccgagagacatggtgtctaaggcccatggcctggagacctgggtgctgctcctagctgactgtggaccttgggcaagtccttcatccgtcctgtgcctcactgtcctcatctgaacaatggtatgatgacacctgccctctctttcaatcatgctttgaggatacagtgagattggttacagtgaaccttcaatgagtagaatgtggtatgccatggtgggttgtagtagatggtgctccctgccttttctcctctgttttcctcaatttgggaacaaatgagattggcagaaggagggagctcacggtgcagtacttttctaccaaagtgtgcccactggtgtcacctcctaatgttaacttggatttcctaaagcagtcccactctgttatgagagtcactgactcccgtggacatccccacagtaagcagccttacaaaatccagtccccttagggcagagtgagtgtcatagaataatgactccaaacccacgtcaaaaatggcttgttttcagcgatgttataaaacaaaggcctgttttttggaattgggggtgactgggtggtttggattgaaatgtggacaaagatagcatgtgtattttgaataaaataaaaattttgtaataaaacttttaaaaatcagtgatgtaaaatcaatatttaagactataggctataaattgtttgatttcattaactagcccttttgatgcctagacatgttgtaaaaaaattgtgctatggctgccttttcttctgccccacaacacaaagggctatttctacaaggcaaagttttgtatatgtgctattctttacttcagattgagagttgggaaaaactggagtaaataatgggtttcttacttgcttaaaagcatatttatatgtgtatctcaatatatacaaggcaggttcccctataaaagtctggaatgtactgcttaattttacacttgtgtagacacgattatttgtgactgaaaagtggaataacgtgtggattttgtcaactcattatcagtctgttagcagtcctctatgtgaggcatggtggtctaattgtgaaattctccctgtatatgggtgtctgtgtgaaagacagcactttcttcctgtaaatatcttttgatatccatttatgtagaattccaatgaatatgtctttggaaaaggtaatgtatcaaagtttttattttgccaattgatctaaatgcccatataactaatcagaaatccagtttggttcagattgggattttcttttaaagaaaaaaaaagtatgcagaaaagactattggaagaatcatgtgttagtgacactttacatcaacgttgcttcaatattttggaattgaccaggctgctttctcctacctgcaagagaatgtgcctgacatttcccagtgcttactttgggctataggaagtccagcggggatagctcgagcctcttgctccctgagtcatttattccctttacctgaacagagccttacctgcaattcatagtgagagcacctgggtctgtatcctgactccactctaagtgaggtgggactgaatcactgtacctctctgggccttttcatttgaaacaagtgggttagactagattagctccaaagtcctctcttgccctaacattttatttttattttcctgtggttaccactagggtctgacacgtaaaatgtgagggatcacttagaggtttggatgttatatttttgcattgttacagcttatactccccagttgaggacctgtgtcattcttagtggccccacgacccctctgtttgtattcctgctccacttatctatacttttttgggtaatcatcccactttttttttttcttgagatggagtctcgctgtgttgccaaggctggagtacagtggtgcaatctcagctcactgcagcctcctcccgggttcaagtgattctcctgcctcagcttcccaagtagctgggattactggcgcacgccactacgcccagctaatttttgtatttttagtagagacagggttttgccatgttggccaggctggtcttgaactcttgacctcaacctgcctcagcctcccaaagtgctgggattacacgcatgagctaccgcgtccagccccactttttttctactcttgaaaaaaacaactttctagtccatgaggtactttggctccatccccctcaaaaacaaaacaaaaaatccatttaaagtgtcctcctagaaaagcctcagaactgccttcaactacatctgtcacctttatagaatattttgaaattctggaagaggatgggaaacaaaattctaatttagctagagctgtgatccccaaataagtgctgacaaaattgtctaccacagaaaggccgtccttgtcatcttgtaggcatcactgctgctaaatcacatcagtacatgccttctgtggggagatggcagggggcaggggcaggaccaggggatgggattagataaagtgtgataatgtcctttagataaaagaaatcctacgctatagaacaaggttctgtactcttgagttggtgtctgagatcacctgcacagtgttacagagattttccactccataaatcactctaaaagagtttgcataagactcggtagacctgtgctattcaatgtggcagtcaacagccatatgtggcgatgactactcaaagtttggcttgttcaaatcgagactgtgttgtacacatacaatacacaccagattttgaaggcttggtaccaaaaaggaatttaaaatatttcaccaatatttcatattgataacatgctgaaatgacactattttggatgtactaagtaaaatattaacaatttaatatatttatataattgaaattaaaattcttttcacccatttttatttttttaaaaatgtggcccctaaagaacttcaaattagacatgtggataacgttatacttctattggacagccccactctagacttacatggtgtggggtaggcagtgaaatccgtaaataggaaacgcaattctgcaaagtatctaaatagacagaaacaacacaaatatttttgctggagtcaggagcactgtgaggcacagaacatctcccagaaagcagattttttttttctgccgaaaaaccaatatatatatgtatgatcccaattaaaagacaaaagcaaatgagccccaaactgcctgtcttcagctttgcctgggagctgctacctttgctcttctagcatcttctaggtaccaaggatattagccacttgagggtgttgggcatatttgtttcattgtaggcaaaatcctcttgtggtttcccctccccaggtattgttgagtctgttcaaagctgggtgtgttgaaacactgcacaaatcctgccactcttgatgtgccgcttgtctcagccttggcagaggctgagtctgttcctgtgcccacctgtccagcaggttttgatgttggctcctgaaagagtttgtatttattttattttgcactagtcacagttgttgttaaactgtatcaaatgttttgggagattatttgcctgagatggaaagagagatggatgatttattgcttcaattgttttaaattaaaagctattctcacaa

SEQ ID NO: 480 - DNA, 5623 bp, Homo sapiens
atgtcactttttttaagggtagtatttagtttcacaatgtttggggacctgtttgaagaggagtattccactgtgtctaataatcagtatggaaaagggaagaaattaaagactaaagctttggagccacctgctcctagagaattcaccaatttaagcggaatcagaaatcagggtggaacctgttacctcaattcccttcttcagactcttcatttcacacctgaattcagagaagctctattttctcttggcccagaagagcttggtttgtttgaagataaggataaacccgatgcaaaggttcgaatcatccctttacagttacagcgcttgtttgctcagcttctgctcttagaccaggaagctgcatccacagcagacctcactgacagctttgggtggaccagtaatgaggaaatgaggcaacatgatgtgcaggaactgaatcgaatcctcttcagcgctttggaaacttctttagttgggacctccggtcatgacctcatctatcgtctgtaccatggaaccattgttaaccagattgtttgtaaagaatgtaagaacgttagcgagaggcaggaagacttcttagatctaacagtagcagtcaaaaatgtatccggtttggaagatgctctctggaacatgtatgtagaagaggaagtttttgattgtgacaacttgtaccactgtggaacttgtgacaggctggttaaagcagcaaagtcggccaaattacgtaagctgcctccttttcttactgtttcattactaagatttaattttgattttgtgaaatgcgaacgctacaaggaaactagctgttatacattccctctccggattaatctcaagcccttttgtgaacagagtgaattggatgacttagaatatatatatgacctcttctcagttattatacacaaaggtggctgctacggaggccattaccatgtatatattaaagatgttgatcatttgggaaactggcagtttcaagaggaaaaaagtaaaccagatgtgaatctgaaagatctccagagtgaagaagagattgatcatccactgatgattctaaaagcaatcttattagaggagaataatctaattcctgttgatcagctgggccagaaacttttgaaaaagataggaatatcttggaacaagaagtacagaaaacagcatggaccactgcggaagttcttacagctccattctcagatatttctactcagttcagatgaaagtacagttcgtctcttgaagaatagttctctccaggctgagtctgatttccaaaggaatgaccagcaaattttcaagatgcttcctccagaatccccaggtttaaacaatagcatctcctgtccccactggtttgatataaatgattctaaagtccagccaatcagggaaaaggatattgaacagcaatttcagggtaaagaaagtgcctacatgttgttttatcggaaatcccagttgcagagaccccctgaagctcgagctaatccaagatatggggttccatgtcatttactgaatgaaatggatgcagctaacattgaactgcaaaccaaaagggcagaatgtgattctgcaaacaatacttttgaattgcatcttcacctgggccctcagtatcatttcttcaatggggctctgcacccagtagtctctcaaacagaaagcgtgtgggatttgacctttgataaaagaaaaactttaggagatctccggcagtcaatatttcagctgttagaattttgggaaggagacatggttcttagtgttgcaaagcttgtaccagcaggacttcacatttaccagtcacttggcggggatgaactgacactgtgtgaaactgaaattgctgatggggaagacatctttgtgtggaatggggtggaggttggtggagtccacattcaaactggtattgactgcgaacctctacttttaaatgttcttcatctagacacaagcagtgatggagaaaagtgttgtcaggtgatagaatctccacatgtctttccagctaatgcagaagtgggcactgtcctcacagccttagcaatcccagcaggtgtcatcttcatcaacagtgctggatgtccaggtggggagggttggacggccatccccaaggaagacatgaggaagacgttcagggagcaagggctcagaaatggaagctcaattttaattcaggattctcatgatgataacagcttgttgaccaaggaagagaaatgggtcactagtatgaatgagattgactggctccacgttaaaaatttatgccagttagaatctgaagagaagcaagttaaaatatcagcaactgttaacacaatggtgtttgatattcgaattaaagccataaaggaattaaaattaatgaaggaactagctgacaacagctgtttgagacctattgatagaaatgggaagcttctttgtccagtgccggacagctatactttgaaggaagcagaattgaagatgggaagttcattgggactgtgtcttggaaaagcaccaagttcgtctcagttgttcctgttttttgcaatggggagtgacgttcaacctgggacagaaatggaaatcgtagtagaagaaacaatatctgtgagagattgtttaaagttaatgctgaagaaatctggcctacaaggagatgcctggcatttacgaaaaatggattggtgctatgaagctggagagcctttatgtgaagaagatgcaacactgaaagaacttctgatatgttctggagatactttgcttttaattgaaggacaacttcctcctctgggtttcctgaaggtgcccatctggtggtaccagcttcagggtccctcaggacactgggagagtcatcaggaccagaccaactgtacttcgtcttggggcagagtttggagagccacttccagccaaggtgcttctgggaacgagcctgcgcaagtttctctcctctacttgggagacatagagatctcagaagatgccacgctggcggagctgaagtctcaggccatgaccttgcctcctttcctggagttcggtgtcccgtccccagcccacctcagagcctggacggtggagaggaagcgcccaggcaggcttttacgaactgaccggcagccactcagggaatataaactaggacggagaattgagatctgcttagagccccttcagaaaggcgaaaacttgggcccccaggacgtgctgctgaggacacaggtgcgcatccctggtgagaggacctatgcccctgccctggacctggtgtggaacgcggcccagggtgggactgccggctccctgaggcagagagttgccgatttctatcgtcttcccgtggagaagattgaaattgccaaatactttcccgaaaagttcgagtggcttccgatatctagctggaaccaacaaataaccaagaggaaaaagaaaaaaaaacaagattatttgcaaggggcaccgtattacttgaaagacggagatactattggtgttaagaatctcctgattgacgacgatgatgatttcagtacaatcagagatgacactggaaaagaaaagcagaaacaacgggccctggggagaaggaaaagccaagaagccctccatgagcagagcagctacatcctctccagtgcagagacgcctgcccggccccgagccccggaaacttctctctccatccacgtggggagcttcagataaccgcgccgctgcacggctctactcccgatgaactctccggctgatgccacaaacgtgggtttcctgggcatggggactggctgcctggcgcctccaatcccaaatcctctgcttcctttgagcacagggacggctcctctgaggcctggccagtgcatgtagtcacttagctctgcaacacgtggcagccacgggggctggtgcagctctggatgtcgcccacccagctgccagtaggtgctgggctctctcacacagcacccggccccagctgcctttttttttcttttaaccagaaaatgcacaacgtgtgcgtgaaccgcaggtatggaggcagcggcatgccgttgctccgctgtgggaggtgtgtggggtcaggccagccactttcctccgtgttcagatgactctcgttcgccctgaccggcttctcacagtgtctcaggccactgcgccaccgcgctggtgctgagcagaagcgggcagaagtggggtctgctttcaggacttcatttcccccactcgttccggccccgcatgctccacgtctgccctttggtctgagttaaaactgcgatgctgaaaagtgcgagctctttccacgaggaggagccacacagggtggcctccgagggtgagtcgctctgctaagcaagggcagccgctgcacgtcagcccgcaggccaagggtccagcttatcctgggtgctctgtgatcagaaggtccttggatcccgaggactgcagctgctgccgtccacagcgcctcagcctctcttcctgtgtggaagcggggcaggcagggctgtggcagacaggcctggcatagcccaggttccaggtgtcctgggcagcctgaccggtttcctgagtagcctcaatgaaaacacctgagaaaaagaaaatgtaaactaaggaagggttttcccacttaatccaacccagatttctattcaacttaaaggatttaattggcatttgtgagaaataatagtacctgtgtcactgagttgattgatttgggacatagacggttgactttcccagacagcagcttagcggaaagcagcatcccgaagacggtgtcgcatgtcctgagcctgcttgtcacctgggcctcacggtttctcgtcagccccgtcactgatgggaagcagcactgaagtgtgagggcagaaaggacaccgctggagtcaggcgctcccctgcctgtgacccttttccaacaagctgatgctgagccagcggcctgctttgtccctcatactcctcccaacagtccaaacccctaccagacagaagccacgtcgcttctgcacacgtgtctgagagcgtctgccatagacgtctgtgcgtttccgtgaagcactgcgccctaaggacccaactctgactagcagctgcctcccactcccaaacactaaccccgctcaggagactcgcactgggtgtagactgcgtctttgcagagggagatgatagaggcttctgatgacgccagagctgtaagtgtcgtgacgagctgggcgcccagcccttcttaagctgttctgtttctgtggctttaactgacatatttctgtagcatctgccttcatctcatctcagcgtaatgaaatattaatgaaatcgctgaaaagctttgccttcgagaggccagaagcctcgcggaatgtctgcaagtccaaagacgcgtgtgggttgtgccctgaagtgccgtccagcaggcgcgtgcggccgggccggcctgtgcgtgtggcctttgccttcttccctttcttcctgttttctgtttttttaatttggggattgagaaagctgtacgattttgttaaagaaaaaaataaaccattttttaaagttgtagcccttaaaaaaa

SEQ ID NO: 481 - DNA, 6612 bp, Homo sapiens
gactggtccctgggtattggggcgtatgcgcatgctccgctcacagggtcgggctctgggcggcggagaccagccgcctgtgctccagttcccggtgagcctcggtactgtggcagcagtcagtgtgtctggcgggtgtcggcgtgaagcggggctgggccagcgggaggtagctctgtgggagtggaaggcctgtatttctctacctggaccgcacgctcctcgcgcaaggagggtagagctcaagttccgtgatgatggtctaagcaaagacccttcgtcctgttaaagataaattaaaaaaaaaaaaaaaaaaccaaagggaacaaaacttactctgcaaaagtaatatatgatttacctgctgttgtcataagaattccaaatagacaaactcggtatgcttgggatttgctttacattctaagtggatttggagaagagacaataaagaataagcagtcaattctataatatatttagaaggagaaaagtgccaaggaggaatgaaaaagtagaacaagatttgctttgaggtcacattgatatgaaatatggagtcaccttttataacttcacctgggaaagagagagaaaactttcttgttaaaaaaacataaggaaaacaaacaaccaaaggaatcatgccaaatgccaactctacatctttttgtattattaacatattttatgcatcaagacaaatggcttatgcattaaaggggatgattcgttcatcagtatttttagccattaaaaaaaatcgttttcatattaaccttatacagctcccataaaatttaacacatataaacatctttaacgccttgtttaaaatagctttcttttttagtgcttagaacttcaatgtttatgcaccctattgttacttgtcagagtctttaagagtttataacatcaggaaagatatggacttggaaacttacattattaaaatagactgcagtggatttaattggacaattcaagacatccattttattgtccaaaatattacataaaagtgtacagtttttagcctaaatgcaaacaaagttgcttgaaaatggcatgggtaaaattcttacggaaacctggtggcaatcttggaaaagtttatcagcctggaagtatgctatcactagcccctaccaaaggcttgttaaatgaaccaggacaaaacagctgctttcttaatagcgctgtacaggttttatggcaattggatatattccgacgaagcttgcgggttttgactggacatgtttgtcagggagatgcctgtatattttgtgcattgaagacgatatttgcacagttccaacacagtcgagaaaaagcacttccctcagataacataaggcatgctcttgcagaaagtttcaaagatgagcagcgatttcaacttggccttatggatgatgctgcggagtgctttgaaaatatgttggagaggattcattttcacatagtgccaagcagagatgcagacatgtgtacctctaaatcttgtatcactcaccagaagtttgctatgactctgtatgaacagtgtgtgtgtcgtagctgtggagcatcgtcagatcctctaccttttacagaatttgtgcggtacatttctacaacagccttatgcaatgaggttgaaagaatgttggaaaggcatgaacgctttaaacctgaaatgtttgcagaattgctacaagcagcaaatacaacagatgactataggaaatgtcctagtaactgtggccaaaaaataaaaattcgccgtgttttaatgaattgcccagagattgttacaattggtttagtctgggactccgagcattctgacttgaccgaagctgttgttcggaatctagcaacacatctttatcttcctgggcttttttatagagttactgatgaaaatgccaaaaatagtgaacttaaccttgttggtatgatctgctacaccagccaacattattgtgcctttgcatttcacaccaaaagttccaaatgggtattttttgatgatgcaaatgtgaaagagattggaactagatggaaagatgttgtctccaaatgcattcgatgccactttcagccactacttttgttttatgcaaacccagatggcacagcagtttctactgaggatgcactcaggcaggtcatcagctggtcacattacaaatctgttgcagaaaatatgggatgtgaaaagcctgtaattcataagtcagataatttaaaagaaaatggatttggtgatcaggcaaagcagagagaaaatcagaaatttccaactgataatatttcatcatctaatcggagccacagtcacacaggtgtagggaaaggaccagctaagttaagtcacattgatcaaagggaaaagataaaagacatttccagagaatgtgctctgaaagctattgaacagaaaaacttactttcttcacaaaggaaagatttagagaagggacaaagaaaagatttaggacgacatagagatttggttgatgaagacctttcacatttccaatctggatcacctcctgccccaaatggttttaaacaacatgggaatccacatctatatcatagtcaaggaaaaggatcatataaacatgaccgagttgtacctcagagtcgagcttctgcacaaataataagttcaagtaaatcccagattcttgctccaggagagaaaataactggcaaagttaagagtgacaatggcactggatatgacacagacagcagccaagattctagggatagaggaaacagctgtgatagcagcagtaaaagccggaaccgaggttggaaacctatgagagaaacattaaatgttgatagtatttttagtgaaagtgaaaaaagacagcatagtccaagacataaaccaaatatcagtaataagcctaaatctagcaaggatccgagttttagtaattggccaaaagagaatccaaagcaaaaaggtttaatgaccatatatgaagatgaaatgaagcaggaaataggaagcagaagttcccttgaatctaatggaaaaggagcagagaaaaataaaggccttgtagagggtaaagtgcatggtgataattggcagatgcaaaggactgagtctggatatgaaagcagtgatcacatcagtaatggttctactaatttggactcacctgttatcgatggaaatggtacagtaatggatatcagtggtgttaaagaaacagtatgcttcagtgaccagattacgacaagcaacctaaataaagaacgtggggactgtacctcccttcagagccaacatcacttagaaggctttagaaaagaactcaggaatttggaagcaggctataaatctcatgaattccacccagaatcacatttacaaataaaaaatcatttgataaaaagatcacatgtacatgaagacaatggaaagttatttccttcatccagtctacaaatacccaaggaccataatgcaagagaacatatccaccagtcagatgaacagaaacttgaaaaaccgaatgaatgcaaattttctgagtggcttaatatagaaaattctgagagaacaggtttgccttttcacgttgataactctgcttctgggaagagagtgaacagtaatgaaccatcttcattatggtcttcacacctaagaactgttgggttaaagccagaaactgctcctctcatccagcaacaaaatatcatggatcaatgttactttgagaactctctatccacagaatgtataattcggtcagccagcagatctgatgggtgtcagatgccaaaacttttttgccagaatctaccaccccctttgccaccaaagaaatatgctataaccagtgtgccacagtcagagaaaagcgaatctacacctgatgtcaaacttacagaggtgtttaaagctacctctcatcttccgaagcacagtttaagtacagcttcagaaccaagtttagaagtgagtacacatatgaatgatgaaagacataaagaaacatttcaagtgagagaatgttttggcaacacaccaaactgtccatccagctcctcaactaacgattttcaggcaaactcaggtgccattgatgcattttgccaaccagaactagactctatttctacctgtccaaatgagacagtttcattaactacctatttttcagttgatagctgcatgacggatacatatagattgaaataccatcagaggcccaagctctcttttccagagagcagtggcttttgtaataattcactatcttagagtgaaaaaggactagacctgtgttacataataatcttggttcaagctgcccttctgaacaaagatataaacctagcatacattgtaatagataactggtaaaactgaccaacttttacttctcagaggccatttaaatataataggaacctactgaccaaacctagtgatacataaaattaaagcctgtggcatttttaaagttgttaatcactatacatatgtatgtgtatatgtgtatacacatatataattttatgatcaatatcttagatattttagaaattccctttgaatagtcttggcgtgccgtgaaaaatagaaaatcagggagatataataattcatttgtcatatgctacagttgaataaaaattaaatttgtccccctattttgtggccagtagactgggaagtattaaactaaccagtactcatgtatggagattataaactatgctaattgaaaagtaccaggtgatacatagcctggtacttttttgtcaaagaattgctttatgaagaagcactttctaatgggtaaccagaaaagggcttcacccatttgtttttgacttctatgatagtcactgcatatgatccctttaagtgtctttaaaaaaaatgacttatgaatttgatagcatttggggaaaaaaagccttatatgattaacaatttgtaagttttcaagatcggatggaatttaattttgctcctagaatttttgtcttcagaatatctagttaagataaattaggcctttgactattataggtattcataaatgctactttagccatgtaagttaaaaagttaaaatacttaaactttagtgtatttatttatctcgttactttttttctaattttatatgaaatgtgaaaggtctttattttggtttggtttactttgggctgctaaccaccagtgttaggaattaatgtagggcaccctcttattgggaatgtcactgtaattgcctacattttctttgctgtaatattacctgcttataggttgtcaacccattttatctgaatttgaaaatctatctaggtttccagattaaatttctacctttcatatagagagtttaattttaataaaatgtttaattagagcatccttcccttttattctactttgaacaaatagtaattttaccccaactacttttcatgaagagtgctttgaaaattaaaggaatttttattattatggtaaccttatgagtaaaaataagttactttaattgctttatttcgttagttgtcattttattttgtactatgctggtaaactaattgtggtttagaatagttttatgttcactcctgataactgagaaacagaactaaagttttccttacattgctaaatggataaacctcatattcaataaactagtaaatgtagccacttgactgattgcgtaaatcgtgttaaaacattctaaaatgttgtaactaatttaatgtgaatactgttaaacagaaaataattgcttataaaagtctaacttcacccagttaccaagtcttggccaaattttatcttctgcctatagtttttactagcctttttaaactataatagtgagtgatcattactttatattctcgtaagttagaaatacttgaatgccaaattaattttgttttaagaaagcttatttttaacataattttttagtgtggagggtttgtaaataatgtaaagtttgtaaacctgtatttaaaataccaaagtttttcttcttttataacattgtaagatactagaaaaatgggcttcaagttttttaatagctttcacagtttgtgtagttttttttttctatttggttaagatgtgagttggaaatgtattatttgaaacatttaaactaatttttgtatttaacagcagtctcagacatttgtcttttcaactcagttgagttgtagatatcaaatagaaatgtccagttttgcctcttttaagtactgtccagttgaaacctcctgactcatgtactactacacaaactagaaaatgcccatttatttttgttgattcaacactccagatacagattgatacatatatactaatcattttatttcatgtaaaagttttacatctagggtgcctatttatttttatagatgctttcatccagttataagcttattataactttgtaaatatttcagccaacagttgtaatgtttaaaatacttaccttcagaatgttatattttcatgtgaaatcaatttcttctaattcaaaaaaattttaagataaactgatttttaagtttaaaaaaaaaaaaaaaaaa

SEQ ID NO: 482 - DNA, 5647 bp, Homo sapiens
gtagtcgctgcacagtctgtctcttcgccggttcccggccccgtggatcctacttctctgtcgcccgcggttcgccgccccgctcgccgccgcgatgccagtgtttcatacgcgcacgatcgagagcatcctggagccggtggcacagcagatctcccacctggtgataatgcacgaggagggcgaggtggacggcaaagccattcctgacctcaccgcgcccgtggccgccgtgcaggcggccgtcagcaacctcgtccgggttggaaaagagactgttcaaaccactgaggatcagattttgaagagagatatgccaccagcatttattaaggttgagaatgcttgcaccaagcttgtccaggcagctcagatgcttcagtcagacccttactcagtgcctgctcgagattatctaattgatgggtcaaggggcatcctctctggaacatcagacctgctccttaccttcgatgaggctgaggtccgtaaaattattagagtttgcaaaggaattttggaatatcttacagtggcagaggtggtggagactatggaagatttggtcacttacacaaagaatcttgggccaggaatgactaagatggccaagatgattgacgagagacagcaggagctcactcaccaggagcaccgagtgatgttggtgaactcgatgaacaccgtgaaagagttgctgccagttctcatttcagctatgaagatttttgtaacaactaaaaactcaaaaaaccaaggcatagaggaagctttaaaaaatcgcaattttactgtagaaaaaatgagtgctgaaattaatgagataattcgtgtgttacaactcacctcttgggatgaagatgcctgggccagcaaggacactgaagccatgaagagagcattggcctccatagactccaaactgaaccaggccaaaggttggctccgtgaccctagtgcctccccaggggatgctggtgagcaggccatcagacagatcttagatgaagctggaaaagttggtgaactctgtgcaggcaaagaacgcagggagattctgggaacttgcaaaatgctagggcagatgactgatcaagtggctgacctccgtgccagaggacaaggatcctcaccggtggccatgcagaaagctcagcaggtatctcagggtctggatgtgctcacagcaaaagtggaaaatgcagctcgcaagctggaagccatgaccaactcaaagcagagcattgcaaagaagatcgatgctgctcagaactggcttgcagatccaaatggtggaccggaaggagaagagcagattcgaggtgctttggctgaagctcggaaaatagcagaattatgtgatgatcctaaagaaagagatgacattctacgttcccttggggaaatatctgctctgacttctaaattagcagatctacgaagacaggggaaaggagattctccagaggctcgagccttggccaaacaggtggccacggccctgcagaacctgcagaccaaaaccaaccgggctgtggccaacagcagaccggccaaagcagctgtacaccttgagggcaagattgagcaagcacagcggtggattgataatcccacagtggatgaccgtggagtcggtcaggctgccatccgggggcttgtggccgaagggcatcgtctggctaatgttatgatggggccttatcggcaagatcttctcgccaagtgtgaccgagtggaccagctgacagcccagctggctgacctggctgccagaggggaaggggagagtcctcaggcacgagcacttgcatctcagctccaagactccttaaaggatctaaaagctcggatgcaggaggccatgactcaggaagtgtcagatgttttcagcgataccacaactcccatcaagctgttggcagtggcagccacggcgcctcctgatgcgcctaacagggaagaggtatttgatgagagggcagctaactttgaaaaccattcaggaaagcttggtgctacggccgagaaggcggctgcggttggtactgctaataaatcaacagtggaaggcattcaggcctcagtgaagacggcccgagaactcacaccccaggtggtctcggctgctcgtatcttacttaggaaccctggaaatcaagctgcttatgaacattttgagaccatgaagaaccagtggatcgataatgttgaaaaaatgacagggctggtggacgaagccattgataccaaatctctgttggatgcttcagaagaagcaattaaaaaagacctggacaagtgcaaggtagctatggccaacattcagcctcagatgctggttgctggggcaaccagtattgctcgtcgggccaaccggatcctgctggtggctaagagggaggtggagaattccgaggatcccaagttccgtgaggctgtgaaagctgcctctgatgaattgagcaaaaccatctccccgatggtgatggatgcaaaagctgtggctggaaacatttccgaccctggactgcaaaagagcttcctggactcaggatatcggatcctgggagctgtggccaaggtcagagaagccttccaacctcaggagcctgacttcccgccgcctccaccagaccttgaacaactccgactaacagatgagcttgctcctcccaaaccacctctgcctgaaggtgaggtccctccacctaggcctccaccaccagaggaaaaggatgaagagttccctgagcagaaggccggggaggtgattaaccagccaatgatgatggctgccagacagctccatgatgaagctcgcaaatggtccagcaagccgggcatcccagccgctgaggtgggtataggtgttgtagctgaggcagatgcggccgatgctgctggcttccctgtcccccctgacatggaagacgattacgaacctgagctgctgttaatgccatccaatcagccggtcaaccagcccattctggccgcggctcagtccttgcatcgggaagctaccaagtggtctagtaagggcaatgacatcattgcagcagccaagcgcatggctctgctgatggctgagatgtctcggctggtaagagggggcagtggtaccaagcgggcactcattcagtgtgccaaggacatcgccaaggcctcagatgaggtgactcggttggccaaggaggttgccaagcagtgcacagataaacggattagaaccaacctcttacaggtatgtgagcgaatcccaaccataagcacccagctcaaaatcctgtccacagtgaaggccaccatgctgggccggaccaacatcagtgatgaggagtctgagcaggccacagagatgctggttcacaatgcccagaacctcatgcagtctgtgaaggagactgtgcgggaagctgaagctgcttcaatcaaaattcgaacagatgctggatttacactgcgctgggttagaaagactccctggtaccagtaggcacctggctgagcctggctggcacagaaacctctactaaaaagaaggaaaatgatctgagtcccaggagctgcccagagttgctgggagctgaaaaatcacatcctggcctggcacatcagaaaggaatgggggcctcttcaaattagaagacatttatactcttttttcatggacactttgaaatgtgtttctgtataaagcctgtattctcaaacacagttacacttgtgcaccctctatcccaataggcagactgggtttctagcccatggacttcacataagctcagaatccaagtgaacactagccagacactctgctctgcccttgttccctaggggacacttccctctgtttctctttccttggctcccattcactcttccagaatcccaagacccagggcccaggcaaatcagttactaagaagaaaattgctgtgcctcccaaaattgttttgagctttccatgttgctgccaaccataccttccttccctgggctgtgctacctgggtccttttcagaagtgagctttgctgctacaggggaaggtggcctctgtggagccccagcatatgggggcctggattcatttcctgcccttcctcagtttaatccttctagtttcccacaatataaaactgtacttcactgtcaggaagaaatcacagaatcatatgattctgcttttaccatgcccctgagcaatgtctgtgctagggaaacttcccgtcccatatcctgcctcagcccgccaaggtagccatcccatgaacacactgtgtcctggtgctctctgccactggaagggcagagtagccagggtgtggccctgccatcttcccagcagggccactcccggcactccatgcttagtcactgcctgcagaggtctgtgctgaggccttatcattcattcttagctcttaattgttcattttgagctgaaatgctgcattttaattttaaccaaaacatgtctcctatcctggtttttgtagccttcctccacatcctttctaaacaagattttaaagacatgtaggtgtttgttcatctgtaactctaaaagatcctttttaaattcagtcctaagaaagaggagtgcttgtcccctaagagtgtttaatggcaaggcagccctgtctgaaggacacttcctgcctaagggagagtggtatttgcagactagaattctagtgctgctgaagatgaatcaatgggaaatactactcctgtaattcctacctccctgcaaccaactacaaccaagctctctgcatctactcccaagtatggggttcaagagagtaatgggtttcatatttcttatcaccacagtaagttcctactaggcaaaatgagagggcagtgtttcctttttggtacttattactgctaagtatttcccagcacatgaaaccttattttttcccaaagccagaaccagatgagtaaaggagtaagaaccttgcctgaacatccttccttcccacccatcgctgtgtgttagttcccaacatcgaatgtgtacaacttaagttggtcctttacactcaggctttcactatttcctttataatgaggatgattattttcaaggccctcagcatatttgtatagttgcttgcctgatataaatgcaatattaatgcctttaaagtatgaatctatgccaaagatcacttgttgttttactaaagaaagattacttagaggaaataagaaaaatcatgtttgctctcccggttcttccagtggtttgagacactggtttacactttatgccggatgtgcttttctccaatatcagtgctcgagacacagtgaagcaaattaaaaaaaaaaaaaaaaaaaatccctgaatgatgattagagacatcaccgctaaaaaactacatttataagctaggatttgttatatgcaaatattttctgcctcttcttttgttctgtttaaaacaataaaatgcatttgtataaaaaaaaaaaaaaaaaaaaaaaaaaaaaaaaaaaaaaaaaaaaaaaaaaaaaaaaaaaaaaaaaaaaaaaaaaaaaaaaaaaaaaaaaaaaaaaaaaaaaaaaaaaaaaaaaaaaaaaaaaaaaaaaaaaaaaaaaaaaaaaaaaaaaaaaaaaaaaaaaaa

SEQ ID NO: 483 - DNA, 2103 bp, Homo sapiens
acttcggggaaggggagggaggagggggacgagggctctggcgggtttggaggggctgaacatcgcggggtgttctggtgtcccccgccccgcctctccaaaaagctacaccgacgcggaccgcggcggcgtcctccctcgccctcgcttcacctcgcgggctccgaatgcggggagctcggatgtccggtttcctgtgaggcttttacctgacacccgccgcctttccccggcactggctgggagggcgccctgcaaagttgggaacgcggagccccggacccgctcccgccgcctccggctcgcccagggggggtcgccgggaggagcccgggggagagggaccaggaggggcccgcggcctcgcaggggcgcccgcgcccccacccctgcccccgccagcggaccggtcccccacccccggtccttccaccatgcacttgctgggcttcttctctgtggcgtgttctctgctcgccgctgcgctgctcccgggtcctcgcgaggcgcccgccgccgccgccgccttcgagtccggactcgacctctcggacgcggagcccgacgcgggcgaggccacggcttatgcaagcaaagatctggaggagcagttacggtctgtgtccagtgtagatgaactcatgactgtactctacccagaatattggaaaatgtacaagtgtcagctaaggaaaggaggctggcaacataacagagaacaggccaacctcaactcaaggacagaagagactataaaatttgctgcagcacattataatacagagatcttgaaaagtattgataatgagtggagaaagactcaatgcatgccacgggaggtgtgtatagatgtggggaaggagtttggagtcgcgacaaacaccttctttaaacctccatgtgtgtccgtctacagatgtgggggttgctgcaatagtgaggggctgcagtgcatgaacaccagcacgagctacctcagcaagacgttatttgaaattacagtgcctctctctcaaggccccaaaccagtaacaatcagttttgccaatcacacttcctgccgatgcatgtctaaactggatgtttacagacaagttcattccattattagacgttccctgccagcaacactaccacagtgtcaggcagcgaacaagacctgccccaccaattacatgtggaataatcacatctgcagatgcctggctcaggaagattttatgttttcctcggatgctggagatgactcaacagatggattccatgacatctgtggaccaaacaaggagctggatgaagagacctgtcagtgtgtctgcagagcggggcttcggcctgccagctgtggaccccacaaagaactagacagaaactcatgccagtgtgtctgtaaaaacaaactcttccccagccaatgtggggccaaccgagaatttgatgaaaacacatgccagtgtgtatgtaaaagaacctgccccagaaatcaacccctaaatcctggaaaatgtgcctgtgaatgtacagaaagtccacagaaatgcttgttaaaaggaaagaagttccaccaccaaacatgcagctgttacagacggccatgtacgaaccgccagaaggcttgtgagccaggattttcatatagtgaagaagtgtgtcgttgtgtcccttcatattggaaaagaccacaaatgagctaagattgtactgttttccagttcatcgattttctattatggaaaactgtgttgccacagtagaactgtctgtgaacagagagacccttgtgggtccatgctaacaaagacaaaagtctgtctttcctgaaccatgtggataactttacagaaatggactggagctcatctgcaaaaggcctcttgtaaagactggttttctgccaatgaccaaacagccaagattttcctcttgtgatttctttaaaagaatgactatataatttatttccactaaaaatattgtttctgcattcatttttatagcaacaacaattggtaaaactcactgtgatcaatatttttatatcatgcaaaatatgtttaaaataaaatgaaaattgtattataagctgaaaaaaaaaaaaaaaaa

SEQ ID NO: 484 - DNA, 3852 bp, Homo sapiens
cgcagaaacttgttgcaacaaacaggcgaccgcgggtgcccctagcagccagcggcagagtgggtgggcgggcgagagggaggggaaggctggcggacgccgcagcgaactggtgggcagacccggagtcgccgcgtaagcggggccggctcagtgcggtgcggcaggcgcggctgtgcggcagcggaagtcctttgttgcagcacagtccctggcagagccagagcctctccgcgcagcccagcccgagcgccgagcgccgcgcgccgccgccactgcagctcgcggccccttcgccttcgcccgcctttcccgcggctgatttgccttaaactccctaaaatctccgcagctctggttcctgttgcggccggtctctaattaacagaagatggcaaagcccagccacagcagctatgtccttcagcagctaaacaaccaaagagaatggggttttctctgtgactgctgtattgcaattgatgacatttactttcaagcacacaaggcagttctagctgcctgtagctcctattttagaatgtttttcatgaaccatcagcatagtactgcacaactgaatctcagcaacatgaaaattagtgcagaatgttttgatctcattttgcagtttatgtatttaggaaaaattatgacagctccctccagttttgagcagtttaaagtggcaatgaactacctacagctatacaatgttcctgactgtttagaagacatccaggatgcagattgttctagttcaaaatgttcctcttctgcttccagcaaacagaacagcaaaatgatatttggggtaagaatgtatgaagatactgtggctcgaaatggcaatgaagccaacaggtggtgtgcagagccaagttcaacggtaaatacaccacataatagagaggctgatgaagagtctttacaattaggtaattttcctgagccactatttgatgtatgtaaaaaaagttccgtgtccaaattatctactccaaaagaacgtgtgtcaagacgctttgggcggagttttacctgtgatagctgtggatttggctttagctgtgaaaaattattagatgagcatgtgctaacctgtactaacagacatttataccaaaacacaagatcttaccatagaatagtagatattagagatggaaaagacagtaacatcaaagctgaatttggtgaaaaagattcttccaaaacattttctgcacagacggacaaatacagaggagacacaagccaggctgctgatgattcagcttcaaccactggaagcagaaaaagtagcacagtggagtctgaaatagcaagcgaagagaaaagcagagctgctgagaggaaaaggattattattaagatggagccagaagatattcctacagatgaactgaaagactttaacattattaaagttactgataaagactgtaatgaatccactgacaatgatgaattagaagatgaacctgaagagccattttatagatactatgttgaagaagatgtcagcataaaaaaaagtggtaggaaaactctaaaacctcgaatgtcagtaagtgctgatgaaagaggtggtttagagaatatgaggccccctaacaacagcagtccagtacaagaggatgctgaaaatgcatcttgtgagctgtgtggacttacaataaccgaggaggacctgtcatctcattacttagccaaacacattgaaaatatctgtgcatgtggtaaatgtggacaaatacttgtaaagggtaggcagcttcaggaacatgctcaacgatgtggcgagccccaagatctgaccatgaatgggttaggaaatactgaggagaaaatggacttggaagagaatcctgatgagcagtccgaaataagagatatgtttgttgaaatgctggatgattttagggacaatcattaccagataaacagtatccaaaaaaagcagttatttaaacattctgcctgcccttttcgatgtcctaattgtggccagcgttttgaaactgaaaatctagtggttgaacatatgtctagctgcttagatcaagatatgtttaagagtgccatcatggaagaaaatgaaagagatcacagacgaaagcatttttgtaatctgtgtggaaaaggattttatcagcggtgtcacttaagagaacactatactgttcatactaaggaaaaacagtttgtttgtcaaacatgtggaaagcagtttttaagagagcgtcagttgcgactgcacaatgatatgcacaaaggcatggccaggtatgtctgttccatttgtgatcaaggaaacttcagaaaacatgaccatgtacggcatatgatttctcatttatctgctggtgagactatatgccaggtctgctttcagatattcccaaataatgaacagttggagcagcacatggatgttcatctgtatacatgtggaatatgtggagcaaaatttaatttgaggaaagatatgagatcacattataatgccaagcatttgaaaagaacctgagtgattttctactgtactaatgtttagatgatagcagataaaacaccaaagcaaaggatatgagctatttaggaattgattatataagatgatttgttagaaacaaatttcaaggcccttttaactttaatatttttgtttaggattttaagtatctacatttaggtattaaatgtttatcatttttgttgtttcttaatagaattatttgtttttagtttttcttagctatgattaaaatttttaaatgtagactacaagtggttgttacccattcaatgactattaaactttagtttttcatcaataaggtgatgacttcactatttctatgtgtttttttttttttaaggttatcctgtgaaattttaaacccagaatcattggccatttctgtttaaattttaaaaattccttaagtaattatttgaaactatcccgtttgcttttagtgagttaactactctttattcccccttattaatgaaattcatattcttaaattgacaagcttattaggcaagttaggtgcactgaatctaacctttaaggttgacatgggctcaaacttggcctaaaaagattgatgaacctgaggaaatttttataaatgaatatttcctataattgataaaatattatcatttaattatcacatttaaaacttatattaagtgtaaattccagtggctttacctcacttgaaaaattagtggggataagccattttgttttgtgatattaaatttaactatgatagttaattaaaaagacatatcttgtattcattaaaaatattttaatttaaaatattctgatttctaaagtgtgttagcttatcaattatttttgtttataaatagactttaatagctctctaagaatatgacctctaaaggaaaagatgattttttacaatacatacttctggaactttgagatttgagaaagcttccatgtatattgataaatctaataaaataaagagatcaattataaacctggttgttctataaaagtagagtgcacaaaaaaatgtcttgtgttttatactgtctaagatttggaggaaatgtggcaaattgcagtttatcgccatattttattatcatttttttctgtaaaagactataaaacttgaggattataaaataatcacagagtatatcaatggaaacagtttatcattttttcagttaaagtagtagtattgttagttgttgctgacacagggtctacataattacatgtgaattaaaacattggcaaaactgacccaccaataaacacatctattgaatagaaaaaaaaaaaaaaaa

SEQ ID NO: 485 - DNA, 2955 bp, Homo sapiens
gggcgggcctcagacacactatgcgggttgcggggcctgggggccggacggctgtttcctgtcctggtgcatggtggtcggacgaaggaattgttggaaaattttctcggaggtagaagatgttgttagcccaaataaatcgagattctcagggaatgacagagtttcctggaggagggatggaggcgcaacatgttacgctgtgcttgacagaggcagtcaccgtggcagatggtgacaacttagaaaatatggaaggcgtaagcttgcaagcagtaacacttgcagatggttctactgcttacatacaacacaattctaaagatgcaaaactcatagatggccaggtcattcagttggaagatggttctgcggcctatgttcaacatgtacccatacctaaaagtacaggggacagtttgcgtctagaggatggtcaagcagtacagttagaagatggtaccacagcatttattcaccacacctccaaagatagttatgaccagagtgcattacaggcggttcagctggaagatggtaccacagcttatatccaccatgcagtgcaagtcccgcagtctgacaccatcttggcaattcaggctgatgggacagtggcaggtctgcacactggggatgctacaattgaccctgacaccatcagtgctttggaacagtatgcagcaaaggtgtccattgatggaagtgaaagtgtagcaggtactggaatgattggagaaaatgagcaagagaaaaaaatgcagattgttttacaaggacatgctacaagagtaactgctaaatctcaacagagtggagagaaggcatttcgatgtgaatatgatggatgtggaaaattatatacaacagctcatcatctcaaggtccatgagaggtcacacacaggagatcggccttatcagtgtgagcatgcaggctgtgggaaggcatttgcaacaggttatggattaaaaagtcacgtcagaactcatacaggagaaaagccatatcggtgttcggaagataattgtactaaatctttcaaaacttcaggagatctacagaaacacatcagaactcatacaggagaaaggccctttaagtgtcccttcgaaggctgcggtcggtcctttacaacatcaaatatcagaaaagtgcacgttaggacacacacaggagaaagaccttattactgcacagagccaggatgtgggagggcatttgccagtgcaacaaattataaaaaccatgtgaggatacacacaggagaaaagccatatgtttgtacagttcctgggtgtgacaaaaggtttacagaatattccagtttgtacaaacatcatgttgtccacactcattccaaaccttacaactgtaaccactgtgggaagacatacaagcagatctccacgctggccatgcacaaacggacagcccacaacgacactgagcccatcgaggaggagcaggaagccttctttgagccgcccccaggtcaaggtgaagatgttcttaaagggtcccagattacgtatgttacaggtgtagaaggggacgacgttgtttctacacaagtagccacagtaacccaatctggactgagtcaacaagttacactcatatcccaggatgggactcagcatgtcaacatatctcaagctgacatgcaggccattggcaacaccatcacaatggtaacgcaggatggcacgcccatcacagtccccgcccatgatgcagtcatctcctcagcaggaacgcactctgttgctatggttactgctgagggtacagaaggggaacaggttgcaattgtagctcaagacttggcagcattccatactgcctcatcagaaatggggcaccagcagcatagccatcacttagtaaccacagaaaccagacctctgaccttagtagcaacatccaatggcacccagattgcagttcagcttggagaacagccatctctggaagaagccatcagaatagcgtctagaatccaacaaggagaaacgccagggttggatgattaatcctcagaacaatggagcaataaagcagaaggagtctttcatcttctggcagcagaaatccatgaagcccgggcccaggaaaattagaagttttccattcctgatacactgtacacatttttatgcgagagtggagaacattttattcttgacacttttgtgtatataacccttggaatagattctcagagtgattcattgtgtacaaggaagtatgaaattagggcaatacagtaaattttcatgttactcttttatcagatcacaaactcctagagtctacatgcaagactagtaaagtcttatggagtcttatgatggatttttaacttcccgtggaaaaaaaaataaaggctgtatctaaaatatcaaaggttctatatgtcacacaatcgtaattccaaaagccattatggataataaagggtgtaaagccttcagatatttccccagttagtagagtgtctgcggtttttgttctactatatgcttgtccatttttatttgtatctcatggtttgcagactgtttgaataatttatagtttcccatccctgttaaaaaccagctcttcaagctgaaatgctaattatattggcattacattgaattatgtacaaaattataaaatttggttatttaaaattaaaaagttaaatccagtggttttgttaaagattttgcttagtattcaatttttattactgttttttaaaaataatgaatcatcaaagtttaaccacaggctggtgcccgggataacagtactgtaattggaaatggctttactctgaaaattaggttagtgggttggtgtaaattatttatttttgcttatgtacttttgttttaaagcttatttaccccaaagtttattattaattttgaatacagcaatttttaaaatgttaaaaaaaaa

SEQ ID NO: 486 - DNA, 2787 bp, Homo sapiens
atctgcgtccgcacctgactcagctgggcaccccggagctacggaggggccagcgggctcccttgcccatgcgtctgggagcgcgcgggggacgtggcgaggctgaaaatgagtctctggaagaggaaacccgatgggatgatgcctggagtctctccctctctcatcagagtgcagtcggcatttggggggcgcatggtggagaatacatatccaatgagcagcgctgccctggcctcgagcactaaatgccagttcccctagctgcttgtgacaaccagaaaacgccccaacaaatcaccagacgttggcagttctccccaaagcaaaggctttagagcttcctgggttaatctggctgccacttgtgagcctcggaggttcctgatctgtacaccaggatggagtctccctctgtcgcccaggctggagtgcagtggtacgatcttgactcactgcaacttccgcctcccaggttcaggctgttctcctacctcagcctcctgagttgctgggattacagtgtcctggtgaagacctagttcttgccggagacaattccactgcagaagcactttacttaaaaggacttgccaggctggacaatgcccgttgacttggggcaggccctaggcctgctgccatcgctggcgaaggccgaggactcccagttctcagaatcagatgctgcccttcaagaggaactctccagccctgagaccgcacgccagcttttcaggcagttccgttaccaggtgatgtctgggcctcatgagaccttgaagcaacttcggaagctctgtttccagtggctacagccagaggttcacaccaaagagcagatcctagagatcctcatgttggagcagtttctgaccatcctgcctggggagatccagatgtgggtgcggaaacagtgtccaggaagtggagaagaggcagtgacccttgtggaaagcttgaagggggacccccagagactgtggcaatggatcagtatccaggttctaggacaggacatcttatcagagaagatggaatctccaagctgccaagtgggggaagtggagccccatcttgaagtggtgcctcaggagttgggacttgagaattcatcctcagggcctggggagcttctgagccacatcgtgaaagaggaatctgacacagaagcagaactagccctggctgcctcccagcctgcccgactggaggaaaggctgatcagagaccaggacctcggagcctcactgctcccagcagcacctcaggaacagtggagacaactggattccactcaaaaggagcaatactgggatctcatgctggagacctatgggaaaatggtctcaggagcaggcatttcccatcccaaatctgacctgactaattcaatagaatttggggaagagctggcaggaatataccttcatgtcaatgagaagatcccaagacccacctgcataggagatagacaagagaatgacaaggagaacctaaatttggagaatcacagggaccaggagctcctgcatgcttcctgtcaagcttcaggagaggttccttctcaggcttccttgaggggcttcttcactgaggatgagccaggatgctttggagaaggagagaatctccctgaggctctgcaaaacattcaggatgagggaacaggggaacagctgtctcctcaagaaaggatttctgagaaacaactaggtcagcatttgcctaatcctcattcaggagaaatgtccaccatgtggcttgaggagaagagagagacctcccagaaggggcagccaagagcccccatggcccagaagctccccacctgcagggagtgtgggaagaccttttataggaattctcagcttatttttcaccaaagaactcacaccggagagacatactttcagtgcaccatctgcaaaaaagcctttctgcggagttcagactttgtgaagcatcagagaactcacacgggagagaagccctgtaaatgtgattactgtgggaaaggctttagtgacttctcaggattgcgccaccacgagaaaatccacacaggagagaaaccctataaatgtcctatctgtgagaaaagtttcattcagagatcaaactttaatagacatcagagggttcacactggagagaaaccttataaatgttcgcactgtgggaaaagtttcagctggagctcgagccttgacaaacatcaaagatcccacttaggaaagaagccctttcaatagccagtaaccaaactctctttccccatttctatctcccagcccagtcacaaaaatactcagctccatcaagaggaattgtgtctaagaggatacccctgttaatctccttttttcttggattggagaggagagaatctggacatggctttggacttggaggatatcttggattggattgcacaatggcttaaattcttgattctgcctcaggagaaagaatagtcttcatgtttccactcatccttcctttggacccatcggggaaaaagtctaaattggagatccagttttagaagtgctttctgggaagcatttaatgggattagctgtagtcactgcttatgggaagaacctcagatcagccccttaaaatgagttctagagcaggtcttctgttccagaaggggagaagcatagagggcctgtgagctcacgtgtgttctttgtcataggggtgaaaaactaacttcaagtgtcccttgtttgaaataaacttagcagagtcactttctatcttaaaaaaaaaaaaaaa

SEQ ID NO: 487 - DNA, 3736 bp, Homo sapiens
cagaggccgagaccctgcaggtgattcctggggctgccagctaaggtcccttatgatttctgctctggctttgcagttttcagcctttcccaagagcagcagaaaatgaacaagttccagggacccgtgacattaaaggatgttattgtggaattcaccaaggaagaatggaagttactgacccctgctcagaggactctgtataaggatgtgatgctggaaaactatagtcaccttgtctcagtgggttaccatgtgaataagccaaatgcagtcttcaagttgaagcaaggaaaagagccatggatattagaagtagaatttccacatcggggcttccctgaagacctatggagcattcatgatctagaagcaagataccaggaaagccaagctggaaattcaaggaatggagaactcacaaaacatcagaaaactcataccacagagaaagcctgtgaatgtaaggaatgtgggaagttcttctgccagaagtctgccctcatagtacatcagcatactcactcaaagggcaaatcctatgactgtgataaatgtgggaaatctttctctaaaaatgaagacctcataagacatcagaaaattcacacgagagataaaacctatgagtgtaaagaatgtaagaaaatattttaccacctatcatctctcagtagacatctgagaacccatgcaggagagaaaccctatgaatgtaatcagtgtgaaaaatccttctaccagaaaccacatctcacagaacatcagaaaacacacacaggggagaaaccttttgaatgtactgaatgtgggaagttcttctatgtgaaggcatacctcatggtacatcagaaaacacacacaggggagaaaccctatgagtgtaaggagtgtgggaaagccttttcccagaagtcacacctcacagtacatcagagaatgcacacaggggagaaaccctataaatgtaaggaatgtgggaaattcttctctaggaattcacacctcaaaactcatcagagaagtcacacaggagagaaaccctatgaatgtaaggaatgtaggaaatgcttctaccagaagtcagccctcacagtacatcagcgaactcacacaggggagaaaccctttgaatgtaataaatgtgggaaaacattttactataaatcagacctcactaaacatcagagaaaacacacaggggagaagccctatgaatgcacagaatgtggcaaatcttttgctgtgaattcagtcctcagattacatcaaaggactcacacaggagagaagccctatgcatgcaaggaatgtgggaagtccttttctcagaagtcacattttattatacatcagagaaaacacacaggggagaagccctatgagtgtcaggagtgtggggaaacctttatccagaagtcacaactcactgcacatcagaagacacacacaaagaagaggaatgctgagaagtaagatgagttgggaaattctcttgactgaattaatccttcaaaacaatcagataattcacacaagaggtacaccttatgaatcgcatcaatagagggaaattttcagctacaatctttgctctctctgtgtatcagcaaatacatagagagattctgtacatttatttgggagaaaattttatcatattttaggcttttctaaatattagataatatagatggcagaagtcatgcaaattgtaaaacaggaaggaaacctttcagaagtcatacttttgttttgcaacatagaagtcacacaggagaaaaatcctgtaagtaaaacgaatgtcaagacattttctgtcagggcagccagctgtagacatccaaaagctcacaaatgagaagctccttgagtatctagaaatctctttacacaattggagctcatgtactagagaattcaaagggataactgcaaagacactggtagatatagaagcctttattaagaattgatgtttcattcaatttcagatcactggtacttggatagatattttaaatatttggaaggtgttcaataaaaattcaaataatttgtactgagggaaacagttatactacaaatcatgttgcagatctgatgccgagattgctctattttaaaaggaaacctgcaaatgtctacatatatgaagcttttaaaaagcacaagttatcaggcaacatcattaaacatacattaaatgtctgttagcatataggattttgtgcgtatgtgagtgtgctataacatgtaacttgcggatgttcagcgtgcatgtggaatccatccataatggtacatagcgaaataatataatcttagttcagtaactattatgtgtatgaagatgttgcacattaagtctcagtagtgactctggttgttaatatttgtattgtaagtgtaatattccttttaaattataaggcatctttttatccttttttgtgtttgtaaatggatatagacagtggtaataactaatccttcaaaaataagttaaaatgtttttgtaaaattttcaaatgtcagtcaagttttgcattagggacacatttatatatagcaaaagcctgagctgtttttaaacagctaaaaacagtagtatttattacaatctccacaatgaaaacaaatagtgcaatgtaagaaatattatgtatcttactgttgatgtgtgagcagggagcagagctatctgcatttgtatttagtgtgagagtcctaaatgttcttcaccaactttttcttcctcatagaagcaacatggcatagttaagggtgtggactctgggctcctgctgcctgggccccgattccagcatggggcatgctacttaatatctctgtgcctcagttcccatcccataaaagagtagtgatagtgacaacatcttaggattgctttgaggtctaaatgagttaacattttcaaagcacttagaatagtgtctgagacacaagagctatatgttagaggttatcatcattatttgtattttgtgaattacgctgcaaaaaaaaaaaaaatgttggctacccaacattcattccccaccttcttgctgccagtgccttgatttggttgtttgttgtttgtttgttttcctacaagtgatttaggggcagatcctgactacactaagtcagggtttgacaaatgacagtccatcagacagatctggcccactacccatttttgtatcctgcaagctaagaatggttttatatttctaaatggttgaaagaatcaaagaatattgtgacacatgaaaattatatgatattcaaatttcagtgtccataaataaagttttgaaaacatgaatacaaacaaaaaacacctatttatgtttgacctgtggctgtctttgcactaccccagcagagttgagtagttgtagcagacaccacatgcccttgagcctaagatctagcactttacaaagtaagtttttctgttacttagagctgaaaataaaagcaatgtagagttacgcttttataagtatttcatgtttcagaaatgatgcatacagcaatttgtaggtgggtggttttttgcagtatatttattttgtgcattatatttatatgttaagagcctgagcttagaagtatttttttcaaagaaatgtgttttttacttgctaaattgtcataacatcaaaacaagaaatttcttgatggaatgtagcagtaaacatatgaaataaacattgtctaaatt

SEQ ID NO: 488 - DNA, 5163 bp, Homo sapiens
atttgcgccgtgtagagttgcatgctgggaaacactgacgggcgcccttccagctgcgtcgaagcttctctggtttcgcattacatttcccagagggccttggggcacagtccaatgaggagcgagccgggtggccggctgaggggcgtgcttcatgctcgcgggatttttaaaaatggtttctcctggatcttatcccaactgcgcctgagaccttgtttcacctcctgatgtgctgggtgtggttaggcctcgagccgggagctatttgcctcccaggaggaagccagggcagggttccgcggggaatggcggtgagggagccactcgggacgcggaggccctaaaatgaagaagcttcggcctgaggcttcgggagcggcgagcagggaagtgggagtgtgtgtgagtgtgtgtgtgtgtgtgtgtgtgtgtgtgtgaataagccagaggctgcctggtggggccccgccgtggcccagtgactgagataattgtcttcgtctgtggggtaatgcgaacaagccccgttcccctaagccgtgatgcatgcggggttgacgcggccgggctctgtccccataaactgtgacacaggtgtgtgtagacgtctatgagggccatagcgccgggctgtaagggcatctgtaggggtgacgcagccgggctgtgtctctgcacctccgttctgtgcgaggtcaatgctggtggggtctgcagaggtggcacggccaggacgggtctccgtgtctctgaaatgtgcctttgcacttctgtcaggttgacagggacaggcagtgtccctctggtgtgagcgtctgtgggtgtgaaagggccagcgagtgtgcggctgtgactggtcgggatcgggcctgggtgcatggccttttgagtgagcacaggtgtgtgcgaccatgtcacctgtctttctagtgtctccgttgcttcctgtgccttggccttccagccatgtggtacctgctagggagcagtggtcccaaagtgacgtgagaggctctacgctattgtgaaaatgaccaagaagaaggcttcacaagtcacgagatggcagttttggagccagaagtgctctccgtgcacactacctggacgacaagaggaagtaacctcaagaatagaattccttttggggaagaaagagctggccttcaggaaaagcatcccggaggaggaagaagaagtgttatatgtcctaaagtaaggtttcaggccagcatccttcagaaaaagcatccccgaggaggaagacgaatcgttaaacatctgaaagggtcaggccagcatccttcagaaaaagcatccccgaggaggaagacgaatcgttaaacatcttaggtcagctctagcctctcggaatttgtcttcttcagtggaaaccccgagaagactgatcagttcttcagttctaaaacaatggcccagggtttggtgacgttcgccgacgtagccatagacttttctcaggaggagtgggcctgtctgaactctgctcagagggacctgtactgggacgtgatgctggagaactacagtaacttggtctcactggatttggagtcagcatatgaaaataagagtttacctacagaaaaaaacattcatgaaataagggcttccaaaaggaattcagatagaagaagtaaatcccttggccgtaactggatatgtgaaggtacgcttgaaagaccacagcgctccagagggaggtatgtcaatcagatgatcatcaattatgtcaaaagacctgctactagagaaggcacccctcctagaacacatcagagacatcataaggagaattcctttgaatgtaaggactgtgggaaggcctttagtcgtggctatcaacttagtcaacatcagaaaatccatactggtgagaaaccttatgaatgtaaagaatgtaagaaggccttccgttggggcaatcagcttactcaacatcaaaaaattcatactggggagaagccctacgaatgtaaagactgtgggaaggcttttcgatggggctcaagcctcgttattcataagaggattcatactggtgaaaaaccctatgaatgtaaagactgtggaaaggcctttcggcgtggtgatgagctcactcagcaccagagattccacactggggagaaagactacgaatgcaaagactgtgggaagacctttagccgtgtgtataaacttattcagcacaagagaattcatagtggggagaagccttacgagtgtaaagactgtgggaaggcttttatttgtggttcaagcctcattcagcataaaagaattcacacaggtgagaaaccctatgaatgtcaagaatgtgggaaggcctttactcgagtcaattaccttactcagcatcagaagatccacaccggtgagaagcctcacgaatgtaaggagtgtgggaaggcctttcgctggggttcgagcctcgttaagcacgagaggatacatacgggcgagaagccgtacaagtgcacagaatgtgggaaggccttcaattgtggctatcacctcactcagcacgagagaatccacacaggcgaaaccccgtataaatgtaaggagtgtgggaaggctttcatttatggatcgagcctcgtgaaacatgagagaattcataccggggtgaaaccctatgggtgtacagaatgtgggaagagctttagtcacggccatcagcttacacaacatcagaaaacgcacagtggggcgaaatcctacgaatgtaaggagtgcgggaaggcatgtaaccacctaaaccatctccgagaacatcagaggatccacaacagttgaagagccttttgaacgcagtagcccgctcgtatctatggtttcgctttccacagtttgttacctgcagtcaactgcagttcaaaaatattaaatggaaaattccagaaataaagaattttaagtctcaaatggtgtgcccttctgagtagcgtgatgaaatctctcgctgtccggctccagccggccggggatgtgagtcatcccttggtccagcacatccacgctgtatacgccacccaccctgctagtgacttagtagccgtcttggtgatcagatcaactatcccagcatcacagtgcctgtgcccaagcagtcctcactttgcttaacagtggccccagagagcaggagtagtgatgctggtgattcggatatgccaaagagaagccacaaagtgcttccttttaaatgaaaaggtgaaagttctcaacttaaaaaagaaaagaaaaaaatcatatactgaggttgctaagatctacatgacaataagatattttgggagagagatacgttcacataattttattacatatattgttacaattgttctattttgttagttactgttggtaatctcttactgtgcctaatttataaattaaactttagatatgtatgtacaggaaaaaatgtagtatatagtatcgtatatatgtacaggaaaaaaacgtactatctgtggtttcaggtgtccactgcgggtcttcaaacgtacccccctcaggtgagaggggactgctgtacaaagaatataggaaggcctctagactacatccattccttcctcaacaggaggaaaattcctggtacagtttaacgtaaggcttcactgatcactgttgtttttgtttttgtttttgtttttttgagacagagtctcactcttgcccaggctggagtgcagtggcacggtcttggctcactgcaacctccacctcccaggttccagcaattctcctgcctcagcctccccagtagctgggattacagacatgcaccaccacacctggctaatttttgtatttttagtagagacagttttcaccatgttgtccaggctggtctcaactcctgacctcaggtgatccacccaccttgccctcccaaagtgctaggattacaggcgtgagccactgcacctagcccactgatcactcttctgcttacagaatatcagaagtcattctagaggcaaatttgaagagtggaaaaatcactttttctgaatgatcttgtttttggtgtagatgtttttattgtgtgggttagtttaatgaatacataaagactaccagtaccattctgtctttactccgtggcatctgtggaataaccctgctaatgtaacacgtgagaaagcctttggtcatgccacccactctaccagttgtccccaccatcccccgccctcctccctgtgagacactgggccaaaggctcactacccctgtgcgttgtccagcacacagacactatgtgcattatttgtacataaggataatcacatctacctgagactgctatcatggaaattaaatgtttggtacatgtaaagtctttgaaagtgtaactggaatattgtgtaattttaataaataataactattgttgtttttatgatcattactaccatttgtgttgccattagtgaatttttacaagaaaactccctgtgggtgcaatgagtctggaaaagaccattgagtcttctagaagaaaacattaagagattattggcacagccgtgggttacgcaatgatttcttagtacacaaaacacagcaaacataaaaagttgttacacttcatcaaaagtacaaagttctgttcatcaaatgatgctgttaagatagggaaaagacaagaaacaggactggaagaagatgtttgctctaaggtacacctgacaaaggaactctcatagaaaatataaagaatccctcaagttgaaaaaaaaatcaatttaaaggggagaaaacttcagcacgtctcaacagaagaccaccaaatggccaataagtaagtgaaaatgtattcaatgtcattgctcctcaaggaactgtagagtaaaaccacaatgtgctgtcactctagacagtcaccaggatgattaaatttaaatcacaataacaaggctgatttcagatgtctcaccacaaagaaggaggataagggagcgaggtgatggatatgttaattagcttgatttaatccttccacattgtatacatgtatcagaacatcacattgtactccatcaatataatacaattattatttgtcaatcaaatattaataaaatcaaagatgagcaggaaaaaaaaaaaaaaaaaaaa

SEQ ID NO: 489 - DNA, 3158 bp, Homo sapiens
gccggagccccagcccggccctgctcgggccgccgggcgcggggctgcggccgcgtcccggaggcgccgccagcacagccaggtgctgttgggaacacagaggaagtgactggctgggggttcagggaaagctccgtagaagagggaacacttgagctgggtcttgaaggatgagtagaagttcaccaagtgggaaaggacactctaggatggccgagcctcgatttaacaacccctacttctggccccctcctcccaccatgcccagccagctggacaacctggttctgattaacaagatcaaggagcagctgatggccgagaagatcaggccgcctcacctgccgcccacgtcggcctcgtcgcagcagccgttgctagtgccgccggcacccgccgagagcagccaggccgtcatgtcgctgcccaagctgcagcaggtgccggggctgcatccacaggcggtgccgcagcccgacgtggcgctgcacgcacggccggccaccagcaccgtcacaggtctggggctgtccacccggaccccgtctgtgagcacttctgagtcaagcgcgggcgcgggcacgggcacgggtaccagcaccccgtccacacccaccaccaccagccagagccgcctcatcgcctcgtcccccaccctcatctcagggatcaccagcccccctctcctggactccatcaagacaatccagggccacggcctgcttggcccccccaagtccgaacgcggccgcaaaaagatcaaggcggagaacccggggggtccgcctgtccttgtagtcccctatcccatcctggcctcgggcgagactgccaaggagggcaagacgtacaggtgtaaggtatgcccactgacctttttcaccaagtcagagatgcagatccactccaagtcgcacacagaggccaagccccacaagtgcccgcactgctccaagtcctttgccaacgcctcctacctggcccagcacctgcgcatccacctgggcgtcaagccctaccactgctcctactgtgataagtccttccggcagctctcccacctccagcagcacaccagaatccacacaggcgacagaccctacaagtgcccacatcctggctgcgagaaggctttcactcagctctccaacctccagtctcaccagcgccagcacaacaaggacaagccctacaagtgtcccaactgctaccgggcctattcggactccgcttctttgcagatccacctctcggcccacgccatcaagcacgccaaggcctactgctgcagcatgtgtgggcgggcctacacctcggagacctacctgatgaagcacatgtccaaacacacggtggtggagcacctggtgagccatcactcgccccagaggacggagtcccccggcatcccggtgcgaatctctctcatctgagcccactggaggcgccgccccacccggcccactggcagacacagacccaggcagcaccaggccccagctccctccgggggccctccaggaaccaccaagctctctcacgaccttcccaatcttccagaaagcttggtccgcagaagccctgcctggtccagtccgggggcggccaggccaactgcaagattctggactgttttggtggcatccaaagacgatctcagagcactttgaacctctctgttgagttttctttttgttccccacccttcacttgcttcactgtttttttttttttcgttttttttttttaagtttgttttggaaataacagaaaagatatttattggccaggaagttggtgctgctaagaccgagaaatttaaagaatcggacagatggacgcagagaaccagagggcaatgtgggaccttctcttgccatggcctcaggtcttgagggaaggctcgggcctaggtttctggactgcaaaggggacccccaggtgggaggggcaggaagcagccggagtgagcccttcgcccctgagtgcctggctcgcacctctcgagctgtgccctgggcatcactgagcagaggggtgcggcagcttcaggaggcagaaacgagaggggtgggagatccacaggaccaaagggtgcagtgatgggctgggtggcgggcccagggaaatggggtggggatgggctgggtaagacctggccctcccctgctgccctgaagaccaccccagtctacctcggtgctggccaggaaacctttcggctacctctcccaccatcccagactgtgggcagggggatggggagggagtgggcctggatctgggacctccctccagaatttcctccagatgggggcagtgcccagggaggggttatttgtcttccctgccatggagtgggaatccccagccgaggccctaggcccctcagcagggaagggatccccggggaggcaggtcccaggagcagaccctgcccccagcccccacagacacaccccaatctgaaagccatgcgtgtcggtgtatataggaaccatgtacagagcccagagaagccccctacatccccccgggaaaaaaaagaaaactagacagaaactcatctatatattctgtatctggagttccgttttgaatattaactgtgttatttttatacactttttaagccttaactcgccattgatttaccagtttaacgtttcctggggtttctttgcccatggggttctctgcccccacccccggccctttgtttgacttgcgtcgtctgatactcagtattgtagctttttgtccgcatgttactccctgtaaatacgctgttatacatactgttaacacccctttgctttttctatgggacctccaggccaccatatttagaactagttaccttattaaaaaagaaaaaacagtctgttggcttctcagtctgcatcttggaggcagggaggtgagggcaggtgcccctcagacacttcaggaaggtagtttgcattctatttaaaaaagggagtggggagcaaatgaaaatcaaatgtggggggaaaacactaaagggggcaagaaacaaaggaattacaaaccctctgctctttgtatttctctgttgtgaagaataaactgtacctgcacccggaaaaaaaaaaaaaaaaaaaaaaaaaaaaaaaaaaaaaaaaaaaaaaaaaaaa

SEQ ID NO: 490 - DNA, 5258 bp, Homo sapiens
ggcttccgggatgtggcggggcctttgtctctggctgcagttggagctctgcgtctcgtcttcgttcttctgtgtcctctgctgctagaggtccagcctctgtggctctgtgacctgcgggtattgggggatccacagctaagacgccaggaccccccggaagcctagaaatgggaccattgacatttatggatgtggccatagaattctgtctggaggagtggcaatgcctggacattgcacagcagaatttatataggaatgtgatgttagagaactacagaaacctggtcttcctgggtattgctgtctctaagccagacctgatcacctgtctggagcaagaaaaagagccttgggagcctatgaggagacatgaaatggtagccaaacccccagttatgtgttctcattttacccaagacttttggccagagcagcatataaaagatcctttccaaaaagcgacactgagaagatataaaaactgtgaacataaaaatgtacatttaaaaaaagaccataaaagtgtggatgagtgtaaggtgcacagaggaggttataatggatttaaccaatgtttgccagctacccagagcaaaatatttctatttgataaatgtgtgaaagcctttcataaattttcaaattcaaacagacataagataagccatactgaaaaaaaacttttcaaatgcaaagaatgtggcaaatcattttgcatgcttccacatctagctcaacataaaataattcataccagagtgaatttctgcaaatgtgaaaaatgtggaaaagcttttaactgcccttcaatcatcactaaacataagagaattaatactggagagaaaccctacacatgtgaagaatgtggcaaagtctttaattggtcctcacgccttactacacataaaaaaaattatactagatacaaactctacaaatgtgaagaatgtggcaaagcttttaacaagtcctcaatccttactacccataagataattcgcactggagagaaattctacaaatgtaaagaatgtgccaaagcttttaaccaatcctcaaaccttactgaacataagaaaattcatcctggagagaaaccttacaaatgtgaagaatgtggcaaagcctttaactggccctcaactcttactaaacataagagaattcatactggagagaaaccctacacatgtgaagaatgtggcaaagcctttaaccagttctcaaaccttactacacataagagaatccatactgcagagaaattctataaatgtacagaatgtggtgaagcttttagccggtcctcaaaccttactaaacataagaaaattcatactgaaaagaaaccctacaaatgtgaagaatgtggcaaagcttttaagtggtcctcaaagcttactgaacataagttaactcatactggagagaaaccctacaaatgtgaagaatgtggcaaagcctttaactggccctcaacccttactaaacataacagaattcatactggagagaaaccctacaaatgtgaagtatgtggcaaagcctttaaccagttctcaaaccttactacacataagagaattcatactgcagaaaaaccgtacaaatgtgaagaatgtggcaaagcttttagccggtcctcaaaccttactaaacataagaaaattcacattgaaaagaaaccctacaaatgtgaagaatgtggcaaagcttttaagtggtcctcaaagcttactgaacataagataactcatactggagagaaaccctacaaatgtgaagaatgtggcaaagcttttaaccatttctcaatccttaccaaacataagaggattcatactggagagaaaccctacaagtgtgaagaatgtggcaaagcttttacccaatcctcaaaccttactacacataagaaaattcatactggagagaaattctacaaatgtgaagaatgtggcaaagcttttacccaatcttcaaaccttactacacataaaaaaattcatactggaggaaaaccctacaaatgtgaagaatgtggcaaagcttttaaccagttctcaactcttactaaacataagataattcacactgaggagaaaccctacaaatgtgaagaatgtggcaaagcctttaagtggtcctcaacccttactaaacataagataattcatactggagagaaaccctacaaatgtgaagaatgtggcaaagcttttaaactgtcctcaaccctttctacacataagattattcatactggagagaaaccctacaaatgtgaaaaatgtggcaaagcttttaaccgatcctcaaaccttattgaacataagaaaattcatactggagagcaaccctacaaatgtgaagaatgtggcaaagcatttaactattcctcacaccttaatacacataagagaattcatactaaagagcaaccctacaaatgtaaagaatgtggcaaagctttcaaccaatattcaaaccttactacacataacaaaattcatactggagagaaactctacaaacctgaagatgtgacagtgattttgacaacacctcaaactttttcaaacataaaataaattatactggtgagaaattctagaaatgtaaagaatgtgataaaggctttacatggttgtcacacttgattgtaggtaagataatttacattggagtaaacttctacaagtgtgaagaatgtggcaaaacttttaattaatgctcgtaccttattgcacaggaaagaatttttacttggaaaaaggtatatacacaaagaatgtggaaaagccattaatatgtgctcatatcttactcaacatcagagagtctgtacttaataaaaccattatagatgcaactagtgtcaaaagatctttcagaaaataaaagcctttaaagtgaagaagataattcattctgaagacaaacattacaaatattaagagggttgtagtaccattacttgcatcacagatcttattgtacacattttgtactaaagaaaaccctgaagcagttgctcaaatactgttcaacatcagaaaatttatattggaaaaaacccctggaaaatgtaataaatttgtaaaaacagttttgaaaaactacagcttataaaacatgagggtctataatgcttggttgatagtacaaagtttattcaacatcagggaatttatattggagaaaaaccctacaaatgtaatcagtttggaaaaacatttttaaaaaaaccacagcatagaaaacaccacagggttcatactaaaatatgtttttgcagatgcagtaaaaatgaaaaaaatttaatccgaaattaagtttatgtaaatatctgagaattcacagtagaaatatctaaggcgcggacacttcagacattacactaaatcagtgctaagtacagaaaacaacacaaaataaaacttggtggataaattatttgtatataacattaaaagaagtagaagattttcagttataattacaattaaagtatacttttatcttgaaaaaattactgatttttaaattagtgaataatgatgtaattaaactctcaaataactttatgctcttttttcattcctgctatattcacatgtgaaagcatgtgaccaattgttgctgcaccaaagatatgagagattcttttattaggtgggcattatttaaaacattttttatggaacagtaaggatattaaagtgtaagatgcagccaggcatggtggctcatgcctataatcccagcactttgggaggctgaggccggtggatcacctgaggtcaggagtttgagaccagcctgaccaacatggtgaaaccctgtctttactaaaaatacaaaaatttaccaggcacctataatcccagctacttcaaaggctgaagcaggagaatcacttgaacctggaaagtggaggtctcagtgagccgaaatcataccattgcactccaacctgggcaacaaaagtcaaactccatctcaaaaagaaaaaaaaaaaaaaaaaagatgcgtgatgaaaatgtaactggagaggctctttgtggttaacttataaaggagtgatgcaggagataggttttcagagtaatattcttctgcattatagtgacaaaagttttttattttagttaaaattggttaaattagtaagtcattttacttattgtaattttatgtaattaaatgtacatttttaaatttttagattacatgtaaatataacttttaaaaaaatgtgttaagaccattgtacattcaatgaagcattattatgcttctaactttaacctatttcaccttactcaagagtgtatgtaaaagatggtaacaatatactatttggtaacataatggactaacatttctattaatctatttcaccagtggctttcaactgcaaataagttaaagaatatttttctataggttaaatattcttttttgtcttatttaaacttactgttcttaatttctgtgggtacatagtatgattttaattaccttattttattctttgtgctattcataattttttttgtttgtttggtttttttttttgagacagagtcttgctctcgcccaggctggagtgcagtggcgcgatcttggctcactgcaagctccgcctcccaggttcactccattctcctgcctcagcctcccaagtagctgggaccacaggcgcccactacttgtttgggtttttttttggagatggagtctcgctctgtcacccaggctggagtacagtggcatgatcttggctcactgcaacccccacctccccggttcaagtgattctcctgcctcagcctcccgaatagctgggattacaggcgtccaccatcacaccaggctaatttttgtatttttagtagagatggagtttcaccatgttggccaggatggtctcgatcttctgacctcatgatctgcctgcctcggcctcccagagttctgggaccacaggcatgagccactgcacctggccaaatgtgtatatatttatgcaatatataacatgttttgatacaggcatataatatgtattagtcacatcaggataaagtatctattaccttcagcatttatcctttgtattacaagccaattctacacttcattattttaatgtacaattaaattgttattgactacagggtcattttaattataaaaattatatagaagtataaataaagtccatacattcctgagtcatgaat

SEQ ID NO: 491 - DNA, 13203 bp, Homo sapiens
atgcctggggagcgcccccgaggagcgccgccccccaccatgactggagacctgcagccccgccaagttgccagcagcccggggcacccctcccagccgccactggaggacaacaccccagctaccaggaccaccaagggtgccagggaggctggcggccaggcccaggccatggagctccccgaggcccagccaaggcaggccagggacggggagctcaagcccccatccctgagaggccaggccccgagcagcacccctgggaagaggggcagcccccagaccccaccggggagaagccccttgcaggctccctcaaggctggcgggcagggcagagggcagccccccacagcgctacattctgggcatcgccagctcgaggaccaagcccaccctggacgagacaccagagaacccacagctggaggctgcccagctccctgaggtggacaccccccagggccctgggactggagctccactcaggccgggcctcccaaggactgaggcccaacccgccgccgaagagcttggcttccacaggtgcttccaggagccaccctccagctttacctccaccaactatacctcaccaagcgccacccccaggcccccagccccggggcccccccagagcaggggcaccagccccctccagcccggttcctatcccgaataccaggccagtggggccgactcctggcctcccgctgctgagaatagcttcccaggtgctaatttcggggttccccccgccgagccggaacctattcccaaaggcagcaggcccggcggcagccccaggggagtttccttccagttccccttcccggcactgcatggggccagcacaaaacccttccctgcggatgtggctgggcacgcattcaccaatgggccactggtgtttgccttccatcagccccagggagcgtggccggaggaggccgtgggcacgggccctgcctacccgctgcccacccagcctgcgccctcacccctgccctgctaccagggccagccaggtggcctgaaccgccacagcgacctcagtggtgccctctcttcccctggagctgctcactcggccccgagacccttctctgacagtttacacaagagcctgaccaaaatccttcccgaaagaccaccttcagcccaggatgggctggggagcacgagagggccccctagctccctaccccagaggcactttccagggcaggcgtacagagccagtggggtggacaccagcccggggcctccggacaccgagctggccgccccagggcccccacccgccaggctgccccagctgtgggaccccacagcagccccttaccccacacctcctgggggccccctggctgccaccaggagtatgttctttaacggccagcccagcccaggccagcggctctgcctcccccagagtgcccccctgccttggccccaagtgctcccgaccgcccggccaagtccccacggaatggagatgctgagccggctgcctttccccgcggggggccccgagtggcaggggggcagccaaggagccctgggcactgctggcaagacaccgggacccagagagaagctgccagccgtgagaagcagccagggcggctccccagcactgttcacctacaacggaatgacagaccctggggctcagcccctgttcttcggggtggcccagccccaggtttcaccccacgggacacccagcctgcccccaccgagggtagtgggagcctcccccagcgagtccccactgccgtcaccggccaccaacacggccggcagcacctgctcttccctgtcgccgatgtccagcagcccagccaaccccagctcagaggaaagccagctccccggccccctcgggccctcggccttcttccacccacccactcacccccaggagacgggcagccccttcccgtccccggagcccccccactccctccccacccactaccagccagagccagccaaggccttcccttttcccgcagatgggctgggagccgagggtgccttccagtgcctggaggagaccccattcccccacgagggccccgaggtgggtcggggagggctgcagggcttcccccgtgcgccgcctccgtaccccacacaccacttctccctcagcagcgccagcctggaccagctggacgtgctgctgacctgcaggcagtgtgaccgcaactacagcagcctggcggccttcctggcccaccggcagttctgtggcctgctcctggccagggccaaggatggccaccagcggtctccaggcccccctgggctcccctcgccccccgctgcccccagagtccctgccgacgcacacgcgggcttgctcagccacgcgaagaccttcctgttagctggggacgcccaggccgagggcaaagacgaccccctgaggacaggcttcctgcccagcctggccgccacccccttcccgctccctgcctcggacctggacatggaggatgacgccaagctggacagcctcatcacagaggcgctcaacggcatggagtaccagtcggacaacccggagatcgacagcagcttcatcgacgtcttcgcggacgaggagccttccggccccagaggtcccagctccggacacccccttaagagcaaggcgggggtgactccagagagcaaagctccgcccccgctcccagcagccacgccggacccccaaaccccccgccctggggacaggggctgcccagcccgaggcaggcccaaaacgcgttccctgggtctggcccccaccgaggcggatgcgcccagccagggcaggcagcagaggagggggaagcagttgaagctgttccggaaggatctggactcgggcggcgcagcagaggggtcggggtcgggcggcggcggcagagcctccggcctgaggccccggaggaacgacggtctcggggagcggcccccaccccgtccccggcgccctagaacgcaggcccccgggagccgcgcagaccccgcgccccgggtcccgagagccgccgccctccccgaggagacccgcagctcccggcgccgccggctgccccccaggaaggaccccaggaagaggaaggctcggggcggcgcctggggcaaggagctcattctgaagatcgtgcagcagaagaacaggctccgcgagtacgacttcgcctcggagtccgaggaggacgagcagcctccgccgcggggccccggcttcagaggccggcggggccgaggcgagaagaggaaggaagtggagctgacccagggtcccagagaggatgagccacagaaaccccggaaggcggcgaggcaggaagccggcggggacggagcccccgcgaaccccgaggagccgggcgggtctcgcccgggccccggcaggagccctcaggcccgtggcccgtctcgaagcctggagacgggagcggccgccagggagggaggccccaagtgtgctgatcgcccctcagtggcccccaaggatcccctgcaggtccccaccaacaccgagacctcagaggaaacccgcccgtcgctggactttccccaggaggccaaggagcctgaaactgccgaagagtcagccccggacagcacagaattcacagaggctttgcgttctcctccagccgcctgtgcgggagaaatgggagcaagccccggtctcctgataccagagcagccgccgcccagcagacatgacaccggcacccccaagccgtcgggaagcctcgccaacacggcgccccacggaagctcgccaacgccaggtgtgggcagcctgctgggtggtcctgggggcacacaggccccagtctcccacaacagcaaggacccccctgcccgccagcctggagaatttctggcacccgtggctaacccctcaagtaccgcctgccccaaacccagtgttctgtcttcaaagatctccagttttggctgtgaccctgctggttttaacagagaccccttgggggttccagttgccaaaaaggggcctcagccctacagcagcccccacagtgagttgttcctcggacccaaagacctggctggctgtttcctggaagaactgcaccccaagccctcagccagggatgccccgccggccagcagctcctgcctttgccaggacggcgaggatgccggttccctcgagccacagctgccaaggagcccacctggcaccgctgagacggagccaggcagggctgcatcgccaccgaccttggagtcctcatccctcttcccagacctgccggtggacagattcgacccacccctctatggcagcctgtctgcgaacagggactccggtctgccgttcgcatgtgccgaccctccccagaagacggtgccgtcagatccaccgtacccctcttttttgctgcttgaggaagtatccccgatgctgcctagccattttcctgatctctcggggggaaaggtgctcagtaagacgtgtccccctgaacggacagtggttcccggcgccgccccatctttgcctgggaaggggagtggatgtagcgttgctcttatgagtcacctgtccgaggatgaactggagatccagaaattggtcaccgaattagaaagtcagctgcaaaggagcaaagacacacgtggggccccgagagagcttgcagaagctgagtcggtgggcagggtggagctcggcacaggcacagagccaccctcccaacggcgcacctgccaggccaccgtgccccacgaggacacgttctcggcagctgacctcacgcgcgttggagaatccactgcacatcgggagggtgcggaatcggctgtggccaccgtggaagcggttcaggggaggcctggggggacgtggccctgcccagcctccttccatccgggacatgcagcccttctcccctgtgcccaggaagacctggtttctggggctcctttcagccccaggggagccaacttccattttcagccagtgcagaaagccggagcctccaagactggactttgccaggcagaaggagacagcaggcccccccaagatgtctgcctgcctgagcccagcaagcagcctggcccacagctggatgccgggagtttagcaaagtgcagccccgaccaggaactttcatttcctaagaataaggaggccgccagctcacaagaaagtgaagactccctgcggctgcttccctgtgaacagagaggagggttcctcccagagcccggcacagcagaccagccccaccgaggggcccctgctccagaagcttttggcagccctgctgtccatctggcccctgacttggcatttcagggtgacggggctccacctctggatgccacctggccttttggtgccagtcccagccatgctgcccagggacattctgcaggcagagcaggtgggcacctccaccccacggcagggaggcctggctttgagggtaatgagtttgcaccggcgggggcctcctcactgactgccccccggggcagggaggcttggttggtccctgtgccaagtcccgcctgtgtatccaacacccaccctagcaggaggtcccaggacccagctttgagcccccccatacgtcagctccagctcccagggcctggagtggctaagagtaaagatggcatcctgggcttgcaggagctgacacctgctgcccagagccctccacgagtgaacccctcaggtctggaagggggcactgtggaaggagggaaggtggcctgtggccccgcccagggctccccagggggtgtgcaggtgacaactctccctgcagtggccggacatcagctggggctggaggcagatggacattggggcttgcttggccaagccgagaaaacccagggccaaggcacagccaaccagcttcagccagagaacggggtgagcccagggggcacggacaaccacgcctcagtcaatgccagtcccaaaacagcgctgaccggccccaccgagggtgcagtcctgctagagaaatgcaagggaagcagggcagccatgagccttcaggaggaggccgagcccaccccaagccccccgtcccctaatagggagtccctggcgctggccttgacagcagcccacagccgaagtggatctgagggccggactccagagagggcgtccagccccggcctgaacaagccactgctggccacaggggatagcccagcaccctctgtcggggacctggccgcctgcgccccctcacccacttcagccgcccacatgccctgcagccttgggcccctgccccgtgaagacccacttacctcgccttccagggcccaaggtgggctgggggggcagctgccagcatctccgtcctgcagggaccctcccggcccccagcagctgctggcctgttctcctgcctgggcacctctggaagaggcagatggcgtccaagccacgacagatactggggctgaggattccccggtggctcccccgtctttgacaacaagcccctgcgatcccaaggaagccctggctggttgccttctccagggggagggcagccccctggaagacccttcctcctggcctcctggctccgtcagtgctgtaacctgcactcacagtggggacacccccaaagacagcactttaagaattccagaggattccagaaaagagaagctgtgggagtctcctggccgagccacctctcctcctctggcaggggccgtctcccccagcgtggccgtcagggctactggcctgtccagcactcccaccggagatgaggcacaggcaggcaggggactcccagggccagacccccagagcaggggagccccgccccacaccaaccctgacaggatgcccaggggccactcctcgtattctccaagcaatactgcccgcctcggccacagggagggccaggctgtcacagctgtgcccactgagcctcccacgctacagggtgcagggccggactcccccgcctgcctggaaggtgagatggggaccagcagcaaggagccggaggacccagggacccctgagaccgggcgctctggtgctaccaagatgcccagggtcacctgcccttccacaggactgggcttgggaagaaccacagccccaagcagcacagccagtgacttccagtctgactccccccaaagccacagaaatgcctcccaccagactccccagggggaccccctcggcccccaagacctcaaacagaggtcccgtggctataaaaagaagcctgcatctacagagaacggccagtggaagggccaagctccacatgggcctgtgacctgtgaggtctgcgcagcctccttccgctccgggccgggcctgagccggcacaaggccaggaagcaccggccacacccgggagcccccgcggagccgagcccagcggccttgcctgctcagcagcctctagagcccctagcccaaaagtgccagccgcccaggaagaaaagccacagggtgtctgggaaggagagaccaaatcactcacggggagaccccagccacgtcacccagccaccgcctgcccagggctcaaaggaggttctcagagcaccggggtccccacacagccagcagctgcaccctccaagccctactgagcatgaggtagatgtgaagactccggcctccaagcccagaccagaccaggccagggaagatgagctgcatcccaaacaggcagaaaaaagagaaggccggaggtggcgccgagagcccaccgtggactctcctagccactcagaggggaagtcaaataagaaaaggggaaagctgagagggagaaggctccgggaggagagcattcttccagtctctgctgatgtgatttcagatgggcgcggctccagaccatcccctgcaatggccagttacgcagcctctccgagccactgcctctctgtggaaggagggcctgaggctgacggggagcagccgcctcgcttggccactctgggacctggggtgatggagggtgcagcggagactgaccaggaggctctgtgtgcaggggagactggggcccagaagccacctggagatcggatgctgtgtccagggaggatggatggtgcagctctgggggaacagccaactgggcagaagggagcctcggcaagggggttctggggaccaagagagaccaaggcgttgggtgtgtgcaaagagtctgggagcgagcctgcggaggacagcagcagggcccacagccgatcagaggaaggtgtctgggaggagaacacgccccccttgggccccctgggttttcccgagacttccagctctccggcggacagcaccaccagcagctgcctccagggcctcccggacaacccagacacccagggtggagtccaggggcctgaaggccccactcctgatgcctctggctccagtgccaaggatcctccaagcttgtttgatgatgaggtctctttctcccagctcttccctccaggcggtcgcttgactagaaagaggaacccgcatgtctacgggaagcgctgtgagaagccggtgctcccgctgccaacccagcccagctttgaggagggcggtgaccccacgctgggcccagcccgcctgcccacggacctcagcgactccagctccctctgcctctgccatgaggacccgtgggaggacgaggatcccgcaggtctgcccgagtccttcctcctggatgggttcctcaatagcagggtgcctggcattgacccctgggcccccggcctcagcctgtgggccctggagcccagcagggaagctggtgcagagaagctgccctcccactgccccgaggacgatcggccggaggccattcctgagctgcacatggtcccagcggcttggcgaggcctggagatgccggcccctgccgatgactcctcctcttctctcggagatgtgagccccgagccccccagcctggagagagaacgctgtgacggtgggcttcccgggaacacccacctgctgccgctccgtgccacggactttgaggtgctcagcaccaagtttgagatgcaagacctgtgctttctgggaccctttgaagaccccgtgggtctccccggccccagcttcttagacttcgagggcacggcgagctcacaggggccacagagccgaaggacagaggaggctgcaggggcagggagggcccaaggcagaggccggccggccaagggcaggcgggcctcctacaagtgcaaagtgtgcttccagcgcttccgcagcctgggcgagctggacctgcacaagctggcccacacgcccgcgccgccgcccacctgctacatgtgcgtggagcgcaggtttggctcgcgggagctgctgcgggggcacctgcaggagaggcacgcgcagagcaaggccgggccctgggcgtgcggcatgtgcctgaaggaggtggccgacgtctggatgtacaacgagcacctgcgtgagcacgcggtccgcttcgcccgcagggggcaggcgcggaggtccttgggggacctgcccggaggcctggagggcagcagcgctgtcgcccaccttctgaacagcatcacggaacccgcgcccaaacaccacaggggcaagcgctccgccggcaaggccgccgggagcccgggagacccgtgggggcaagagggagaagccaagaaagacagcccgggcgagagggcgaaaccccgggcacgcagcacccccagcaacccagacggggccgcgaccccagacagcgcctctgccaccgccctggctgacgccggcagcccgggcccccccaggacgacccccagcccgtcccccgacccctgggccggcggggagcccctcctgcaagccaccccggtgcacgaggcctgcaaggacccctcccgcgactgccaccactgcgggaagcgcttccccaagcccttcaagctgcagcgccacctggcggtgcacagcccgcagcgcgtctacctgtgcccccggtgcccccgggtctaccccgagcacggggagctgctggcacacctgggcggggcgcacgggctgctggagcggccggagctgcagcacacgccgctgtatgcctgcgagctctgcgccacggttatgcgcatcatcaagaagtccttcgcctgcagctcctgcaactacaccttcgccaagaaggagcagttcgaccgccacatgaacaagcacctcaggggggggcggcagcccttcgcgttccgcggcgtgcggaggccgggagcgccgggacagaaggcccgggccctcgagggcacactgcccagcaaacggcgcagggtggccatgcccggcagtgcccctgggcccggcgaggacaggcctcctccccggggaagcagccccatcctgagtgagggctctctcccggccctgctccacctgtgttcggaggtggctcccagcaccaccaagggatggcccgagaccctagagaggcctgtagaccccgtgacccacccgatcagaggttgtgagctgccatccaaccaccaggagtgtcccccgccgtctctgtctcccttcccagctgccttggctgatggcagaggagactgcgcgctggacggagccctggagaggccagagaacgaggcttccccaggcagccccgggcctcttctccagcaagctctccctctgggggcatctctgccgcggccgggagccagaggccaagatgcggagggaaagagggctcctctcgtgttctcagggaaacgcagggccccgggtgcccgtggcaggtgtgcccctgaccatttccaggaagaccacctacttcagaaagagaaggaggtgtcctcaagccacatggtgtctgagggggggccccgaggcgccttccacaagggcagcgccaccaagcctgcgggctgccagagctcatcaaaggacaggtcggcagcatccacccccagcaaagcactcaagttcccagtgcacccaaggaaggcggtggggagcctggcacccggggagctggcccgtggcacagagaatgggatgaagcccgccacccccaaagccaaacccggccccagctcccagggcagtggaagccctcgccccggcaccaagacaggaggtggcagccagccccagccagccagcgggcagctccagagcgagacagccaccaccccagccaagcccagcttccccagccggagccctgcaccagagaggctccccgctcgagcccaagccaagagctgcaccaaggggccaagggaagctggtgagcaggggccccacgggagcctaggtcccaaggagaagggagagagcagtacgaagaggaaaaagggccaggtcccagggccagccaggagtgaaagtgtggggagcttcgggagagccccctcagcccctgacaagcccccccggacccctcggaagcaggcaactcccagccgcgtgctcccgaccaagcccaagcccaacagccagaacaaacccaggccgccaccatcagagcagcggaaggcagagccgggccacacacagaggaaggacagactgggcaaggccttcccccaggggagacccctgctcaggccccccaagaggggcacagctgtccacggtgctgaacctgccgagccacacacccaccggacggccgaggcccagagtgacctcctcagccagctcttcgggcagagactaactggcttcaaaatccctttaaagaaagatgcttccgagtaatttctaggagcaagagcctgggaccggagctgggcgttcctgtctcggcctgcctccttggccagctccggctccctgagatggtccactctgtggccacttgacttcttgtgcaactgctcaggccttgatgtcagagctgaggtggtgatgctttgaacagggcccaggtgggcagcattccctttcttgctggaaggctgggggtgaaagacggggccactgcagcccttttgagaccacacagctgttttcttggtaccaagtacttgaagagacagcagcccatcccctcagcccacacccctgcgccctgtgggcaccgacaccacagaagccaatgtttggagatttgcacaacctcccgttcccccacatggagaagggaagtaagttgaggcagccgtgggatggtggtaggttccctcttagtcttgctgctgttgctggaattccaaagtgaccttagaaaccacgtgggggaaggcagtgctcactacttagaagggttgcttctgagccgcctggtcccccaagagcacaacaggcctcctccctctgaccacagggtcatgcctcctccctctgaccacagggtcatgccagcctccatttgctctgcgggagaaaagcccatctctagcacaccttgaccccaggaaccgggttcccgtatggaactgggaagaaaccgcccctgtgccagctcccgcgggccctcctcgttccctcccagcctccatggccgccctctagagcctccctgctgtacggagctctgggctccgcctatttgcaatgttactctgaagtttctggtgctatttttgtgttgtaatgtgaatacaggcttccttgatttttttttttaatgggggtattgggtgggacagacggggtcagggaggccccaccatggcttgtcgagggcacgggcacctgcatggcggcgctctccctgcctcccctgccgggctgcaagcctgaggtctgtgctgccagacggggatgctcagggctggggctgcagagccgctgccctggccagggcaccctcatgcaccgacccaacccaggcctgggacgcacgtgtcctctcacagcgtcgtgcctgtgaaggtgggtcaaagggtgagagggcttccttctcacccttctctccataagtatcttgaagatccatggtttgttttgctctattgtttagtttttacttgggtgcaatgtgtacgtcaaaagtttttattttgatatttgaaagagaccaaatcaggcccagaccgcctctctggaaggtgttgtaggccattcaaaacgcctccggagtgtcgcaaaccaagtgcggaggggccctgaggttgtactgtaaacatcatagtgacttgtcttttcaaatatattcccactattttcgcagaaaacctc

SEQ ID NO: 492 - DNA, 3068 bp, Homo sapiens
gtttgtattagttgggtttcccggtgtctctttagcaagtgaagtttctggttccctccttcactgtgtgacctgcctagtcctcctgggttgcgtttacagaagtttatacgagacctagtttccagggaagaactcactgatgccgcgagggagatggggtactggatgatggtcttcagccttaagggtacttcagtcttaaccgtgtgttataaggtttgaaagggagggttccctatgaataagaagcgcacttgaaagaacagccctctggtctaacctcccactggtgcttcagaggaggataaaaggtcacagctatgtttccagtgttctctggctgtttccaagagctacaagaaaagaataaatctctggagttggtgtcctttgaggaggtagctgtgcacttcacctgggaggagtggcaggacctggatgatgctcagaggaccctgtacagggacgtgatgctggagacctacagcagcctggtatcattggggcattacattaccaaacctgagatgatcttcaagctagagcaaggagcagagccatggatagtagaagaaaccccaaacctgagactttcagctgtccagatcattgatgaccttattgaaaggagccatgaaagtcatgatagatttttctggcaaattgtaatcaccaacagcaacacatcaactcaggagagagttgaattaggaaaaacatttaatttgaactcaaaccatgttttaaatctgattataaataatggaaacagttcaggaatgaagcctgggcagtttaatgattgccagaacatgcttttccctattaagcctggggagacacagtctggagagaaacctcatgtctgtgatataaccaggagatcccacagacatcatgaacatcttactcagcatcacaagattcaaactctgctgcagacttttcaatgtaatgaacaagggaaaaccttcaacacggaggcaatgttctttatacataagagggttcatatagtacagacctttggtaaatataatgaatatgagaaagcctgtaataactcagctgttattgtccaagtgataactcaggtaggacagccaacttgctgtagaaagtctgacttcactaaacatcagcagacacacacaggagagaaaccctatgaatgtgttgaatgtgagaaaccctccattagcaaatcagaccttatgctacagtgcaagatgcctactgaggaaaaaccttatgcctgtaactggtgtgaaaaattgttcagctataagtccagcctcattatccatcagagaattcacacaggggaaaagccctatggatgcaatgaatgtggtaaaacctttcgccgtaagtcattcctcactttacatgagagaactcacacaggggataaaccctacaaatgtattgaatgtggaaaaacttttcactgtaagtcacttctcactttacatcacagaactcactcaggggaaaagccctatcagtgtagtgaatgtggaaaaacctttagccagaagtcatacctcacaatacatcatagaactcacacaggggaaaagccctatgcatgtgaccattgtgaagaagcatttagccataagtcaaggcttactgtccatcagagaacacacacaggggaaaaaccgtatgaatgtaatgagtgtggaaaaccctttatcaataagtcaaacctcaggttacatcagagaactcacacaggggaaaaaccctatgaatgcaatgaatgtgggaaaacgtttcaccgtaagtcattcctcactatccatcaatggactcacacaggggaaaaaccctacgaatgcaatgaatgtgggaaaacctttcgctgtaagtcattcctcactgtccatcagagaactcatgctggggaaaaaccatacgcatgtaacgaatgtggaaaaacatatagccacaagtcataccttacagtacatcacagaactcacacaggggaaaaaccctatgaatgtaatgaatgtggaaaatcctttcactgtaagtcattcctaactatacatcagagaactcatgctggcaaaaaaccctatgaatgtaatgaatgtgagaaaacctttatcaataagttaaaccttgggatacacaagagaactcacacaggggaaagaccctatgaatgtaatgaatgtggaaaaacctttcgtcagaagtcaaatctcagcacccatcagggaactcacacaggagagaaaccttacgtatgtaatgaatgtggaaaaacctttcatcgcaagtcattcctcaccatacaccagagaactcacacggggaaaaaccgtatggatgtaatgaatgtggaaaaactttttgtcagaaatcataccttattatacatcagagaactcacaccggggaaaagccctatgaatgtaatgaatgtggaaaatcctttcatcagaaggcaaatcttcagaagcatcaaggtattcacacgggggagaaaccctatgaatgtagcaaatgtggaaaaaccttgtcagaagtcagtcctcactgtacatcatagaacccataccggagaaaaaccttatgaatgtaatgagtgtgggaaaaccttttgtcacaagtcaaacctcagtacgcatcaggggactcactcaggagagaaaccctatgaatgtgatgaatgtaggaaaactttttacgataagacagttctcaccatacatcagagaactcacacaggtgagaagccatttgaatgtaaagaatgtaggaaaaccttctcccagaagtcaaaactctttgtacatcacagaactcacacaggggaaaaaccctttagatgtaatgaatgtaggaaaactttctcccagaagtcaggcctcagtatacatcagagaacacacacaggagaaaaaccttatgaatgtaaggaatgtgggaaaaccttttgccagaagtcacacctcagcaggcatcaacaaacccatataggagagaaatctgacgtagctgaggcaggctatgtgttccctcaaaatcactcttttttcccttga

SEQ ID NO: 493 - DNA, 2690 bp, Homo sapiens
ggatatcgcgcgaggcaagctgcgcgcgggcgggcgggctatggcgcaggcgggttgtggggccggcgctggtggcggggcccggtgcatggcggtctgtcggcggagtcgccctcgggggctgtcagatttgtgacccagaaggaaatctctgacctcagctgtggctcttggtgctggccagaagccaacttcatgtctgagtgcacgagcagcagtttgccatggagagcttggggctgcacacggtgacccttagtgatgggacaacagcctacgtccagcaagctgtcaaaggagagaagcttcttgaagggcaggtgatccagctcgaggatgggaccaccgcatacattcaccaggtgacggtacagaaagaagctctctcctttgaggatggtcagcctgtgcagctggaagatggcagcatggcttacatacaccgcacacccagagaaggctatgaccccagcaccctggaagccgtccaactggaagatggctccactgcctacattcaccaccctgtggctgtgccatcggagagcaccatcctggccgtacagacagaggtgggcttggaggacctggcagcagaggatgatgagggcttcagtgcagacgcagtggtggccctggagcagtatgccagcaaggttcttcatgacagccagattccccgtaatggaaaagggcagcaagttggagacagagcattccgctgtggctacaagggctgtgggcgtctctacaccaccgctcatcacttaaaggtgcatgaacgagctcatacaggtgaccgtccatacagatgtgacttccccagctgtggaaaggcctttgccacaggctatggactgaagagccacgttcgtacccacactggtgagaaaccatacaagtgcccagaggagctgtgcagcaaggccttcaagacctcaggagacctgcagaagcatgtccgtacccacactggtgaacgcccgttccagtgcccttttgagggctgtggccgctccttcaccacatctaacatccgcaaggtacatgtgcgcacccacacaggcgagaggccctacacctgcccggagccccactgtggccgcggcttcaccagcgccaccaactataagaatcacgtgcgcatccacacaggggagaagccatacgtttgcacggtgccaggctgcgggaaacgcttcaccgagtactcgagcttgtataagcaccacgtggtgcacacacactgcaagccctacacctgcagcacctgcggcaagacctaccggcagacctccaccttggccatgcacaagcgcagtgcccacggcgagctggaggccacggaggagagcgagcaggccctctatgagcagcagcaacttgaggccgcctctgcagccgaggagagtccgccacccaaacgaccccggatagcttacctttcggaggtgaaggaagagagagatgacatcccagcccaggtggcgatggtgactgaagaagatggggccccccaggtggctctgatcactcaggatggtgcccagcaggtcagcctgtccccggaagacctgcaggccctggggagtgccatcagtatggtcacccagcacggcagcaccaccctcaccatccccagtcctgatgccgacctggccacatctggcacacatacagtcaccatggtcagcgccgatggcacccagacgcagcccgtcacaatcattacctctggggctgtggtggctgaggactcaagtgtagcatctcttcgtcatcaacaggtggcactgttggccacagccaacggaacgcacattgcagtgcagctggaggaacagcagaccttagaggaggccatcaatgtggccactgcggccatgcagcaaggggctgtgaccctggagacaacagtgtcggagagtggctgctgagtccaagagggctgggtcccacaccatgctggaggaagtgccatctgcatggccactcttgcccccaagggcccaggctgtggctgacacatagaaggtggccacataggtctctggggtgagaagacagcaagaaaactgcctaactgaagggaatgggggccctgctcaagaagggggccaggcagctggaatcaggggagtgcatcatcctcgggagctgacaacagccaggctacaccagggcacccgcctctcaaaatcagctgggcgcccactctcctcctaaagaacacccttctggccctcagtctgttccccttctcaggtagagattggggctgctatggggactggccctgtagggttgagccacagacagctcttcagcccagtagcagtggagcaggccctgtcctgccctcccagcaataaccacctccctggaggccagctgagatgcctggctacttggcaccagggacttcctgacaccacagtcaattaattcctcaggggcctgtggctgaagaaaaggtgcccagcccccaccactcctcagctgccccccaacctctctatggcagagaggcagggagtggccctgtacatagactgctggggattgggtttgatttgttttgttttttttaattccattttgataatttttttcctgctctgggtggtggtggcacatggatgaatgagtatttaataaaagttccaaatttccaccaaaaaaaaaaaaaa

SEQ ID NO: 494 - DNA, 4489 bp, Homo sapiens
atctccgtccggggtcagtcagtcgctccctgtcgctgccggagagtctctgcttcccccttcctacgcgctccgcggcggtagctcgggctctccggaggagggggcgacagagtaaaagagaggctgacttaataaagtttcctgaaacaacaactaccaccgaaaaggcccaaggttgggggagacccccatttttctccgcccctctcctaaagcctgagggaccgttgcaggtggagcggcgctggtgggacccgggttgcggcggcagccgttgccccggcgagggaagcctcaggtcctgcccgctccggttccggctccttcggtggtggcggcggcagctgctgccgggcggttcctcctgtcaactgcctccgcccgcgcgcctcccgcctagccacacagcgcggaggacgccgtgagccgccgccgcagtcgtctcggcccgcggagggacgtggtgagctgtggcgcttccgcgtcagcgccggcggggactctttgggagcgcgtcgggcccgagtccgggttcccccgcgtggtcagcggaggctgcgccaggtggggcccgcagccgcctcccacgccaggctgtccccgcggccgcccggcctgccttccttccttccgcccgcccgccggcccgccctaagagttgaccacgccgcaatgaagagcttcttacagtgaaagcaaagtaggtcgagtccactgaaaatgcctttaagggacaaatactgtcagactgaccaccatcatcacggatgctgtgaaccagtttatatcctggaacctggagatcctcctttgttacagcaaccactacagacatccaaatctggtattcaacaaataattgagtgctttcgatcaggaactaaacaacttaagcatattttattaaaagatgtggacactatttttgaatgtaagttatgccgcagtctcttcagaggattaccaaatttaattacccataaaaaattctactgcccaccaagtctccagatggatgacaaccttcctgatgtaaatgataaacaaagccaagccataaatgatctcctagaagccatatatccaagtgtggacaaacgagaatatattattaagctagaacccatagaaactaatcaaaatgcagtatttcaatatatttcgaggactgataatcctattgaagtcacagagtcaagcagtactcctgaacaaaccgaagttcagatacaggaaactagcactgaacagtcaaaaacagtaccggttacagatacagaggtggaaactgtagagccccctcctgttgagattgttacagatgaagttgcacctacatctgatgaacaacctcaggagtcgcaggctgacttggaaacttctgacaattctgattttggtcaccagttgatatgttgtctttgtagaaaagaattcaattctagacgaggtgttcgccgtcacattcgaaaagtacacaagaaaaagatggaagaactaaaaaagtacattgaaacacgaaagaatccaaaccaatcctctaaaggacgcagtaagaatgttctagttccattaagtaggagttgtccagtatgttgtaaatcatttgctacaaaagcgaatgtaaggaggcattttgatgaagttcatagaggactaaggagggattcaattactcctgatatagcaacaaagcctgggcaacctttgttcctggattctatttctcctaaaaaatcttttaagactcgaaaacaaaagtcttcttcaaaggctgaatacaatttaactgcatgcaaatgcctcctttgcaagaggaaatatagttcacaaataatgcttaaaagacatatgcaaattgtccacaagataactctttctggaacaaactctaaaagagaaaaaggccctaataatactgccaacagttcagaaataaaagttaaagttgaaccagcagattctgtagaatcttcacccccttccattacccattctccacagaatgaattaaagggaacaaatcattcaaatgaaaaaaagaacacaccggcagcacagaaaaataaagttaaacaagactctgaaagccctaaatcaactagtccgtcggctgcaggtggccagcaaaaaaccagaaaaccaaaactttcagctggctttgactttaagcaactttactgtaaactttgtaaacgtcagtttacttccaaacagaacttgactaaacacatcgagttgcacacagatggaaataacatttatgttaaattctacaagtgtcctctttgcacttatgaaactcgtcggaaacgtgatgtgatacgacatataactgtggttcataaaaagtcatctcgttatcttgggaaaataacagccagtttagagatcagagctataaaaaagcctattgattttgttctaaataaagtggcaaaaagaggcccttcgagggatgaagcaaaacatagtgattcaaaacatgatggcacttctaactctcctagtaaaaagtatgaagtagctgacgtcggtattgaagtaaaagtcacaaaaaacttttctcttcacagatgcaataaatgtggaaaggcatttgccaaaaagacttaccttgaacatcataagaaaactcataaggcaaatgcttccaattcacctgaaggaaacaaaaccaaaggccgaagtacaagatctaaggctcttgtctgataacttcaagtgatgtacgaaaaggtttggagttcatttttgtggaaagactttaaattggtgttagaaccactaaacatcttcaaatggtactatgaggaaaaaaagaaaaacatttttctaaatattcaactataactgctgttttctgactaaaataaccatctaaccacttgtttctaaggcactgcctattccagcactttcaagtagctgtgatattacatgttgtcatcacagtccatcagctatccacccttgaccttgtgcatttggtcgacagtttctacaaaaatgttacaaattttgttttctaaacaatttgttgattaagtgatcaacaacctgaagaaaatatcaatttttaattgacaaagactttatatcttagtgattttagttttgtttctctttatttggcaacattttcatctgaattgtatagatatatgattttctagtgagtgtatgttaggaacaaaagacaaaatagtatcaacacattataaatatttagcttactaaatatttgtaattatttttacatccatttatttctagcttgttctccagcacttcagtgtttgaaagtttcatcctaaaatatatactacaggaaagctgcagttcattttcatgcatggatcattacatttttcacttgtaaatgtaggtttttatgaaaattaaacattcccctatttttctttaaattttatacaaagcactttaatgatagatgcaaccttatttttcagttcctatttttttaaagaccacacatttactaatgttaatatgaaggtaataaatagcttactgatattttatggatgcagacaatccatgcacaaccacttcttatgatactagtttatttccttaaatattgctacaaaaggaagatgcgggtgtaagccctgatttttttttctcccaagaaaaatcttaaaggaccactttagataatatttgattcctactgtaaaatttagaaaatgatgaattcttgtccatttttgtaatcaagattttaggaaaaacagaagtacatctatctttatgaaattttgggcaggtttttgtgtatcaatattttgtacttttagggaatattttattttttagttatttgtgtcaaattataattataaaaggtacagcagaaaatataccatgtttttatataggttcacacctgtacttaggagggaccctgtccatctatatactttttgtataaaattttaaaatgttaaagatccacaaggtcttaataaaatgattctatagctagaaaaacatttaccttcccagtgctttgcactaaaatatactgtgaaaggaaactagaaagactgtaactattgctggaaatgttctatattgaatgtacatgctcttgttggaaaaatgtactatatgtgatggaaataaaccagaatcgaagttatttcagctaaatgtgcttcagcaaaggtgcattggttgaaacttaaatgttttattatcaaatttaaacttattcagtgactatgagcagctacacttgaattatattctgatagttttatttctaagaaatagagtaataatttctctttaatttaaaaacagatttactttcccacatattgaaaatttgtacttatagatctaactttaataactaatagtataatatatttagggaactaaatgtgtaggtggtatttcatttataagccatcttcattagttgcacattattaaacctatatgtttgactttt

SEQ ID NO: 495 - DNA, 4700 bp, Homo sapiens
ggccgcgggtcccggcggcggggtgggcgggggaggcagcgggtgacagatgtactcctctgacagctctcagtatcagcccagtggctccctgccattggctcagtgcaatggaccggcaacgccgctcactataataacactcatgcctgccagcagcagcaactccgagtgcaggcgccgagcgcgggggatgctgccgccgccgccgcttctgctgccgcgcgggcggctcccgcagccccgctccgcccggccaccgcgcgggcactgactcccgctcggttccgtttcgccggcccggccccctcctaggctggaatcctcccgcggggctcgtcgtcccgacgcgaatctgaggagaaacaggagcgagagactgaggggagagcgcggcgagcatgcggaggcgggggagcctcggcgctcaccacagaggggtgcagtgagccagtctccagaggacgtgccgggggtggctgcgtgccctcgtggcgggttcccagcccaccgtcgccggccccggcgcgctgcggctgtgggcgcggggtgcgtggaagcggcggctgcggcggaggaggcggcggctgccccatggagtgttactacattgtcatcagctccacgcatctcagcaacggacactttcgcaacatcaagggagttttccggggccctctcagcaagaacgggaacaaaactctggactatgctgagaaggaaaataccatagcaaaagctctggaagatctgaaggcaaatttttactgtgaactctgtgacaagcagtactataagcaccaggagtttgacaatcacattaattcatatgaccatgctcacaagcagaggctcaaggaactgaaacaaagggaatttgctcgaaatgtagcatctaaatccaggaaagatgaaagaaaacaggaaaaggcactccaacgcctgcacaagctggctgagctaagaaaggaaactgtatgtgctcctggaagtggccccatgttcaaatcaacaactgttactgtgagagaaaactgtaatgaaatttcccaacgagttgttgtggattcagttaataaccagcaagatttcaaatatactttgattcatagtgaagagaatactaaagatgctaccactgttgctgaagatccagaaagtgcaaataattatacagcaaaaaataaccaagttggggatcaagcccaggggattcacagacacaaaatcggcttttcttttgcatttccaaagaaagcgtccgtgaagctagagtcctcagctgcagccttctctgaatacagtgatgatgcctcagtgggaaaaggatttagcagaaaaagtagatttgtccccagtgcttgtcatcttcaacaatcttcaccaacagatgtgcttttgagttctgaggagaaaactaactcttttcatccaccagaggcaatgtgcagagacaaagaaactgttcaaactcaagagataaaagaagtctctagtgaaaaagatgcattattattaccttcattttgcaagtttcaacttcagttatcttctgatgcagataattgtcaaaattcagtcccattagcagatcaaataccactagagagtgttgttattaatgaagacatacctgttagtggtaacagttttgagttgttaggaaataaatccacagttcttgacatgtctaatgattgcatatctgtgcaagctaccacagaggaaaatgttaagcataacgaggcatccacaactgaggttgaaaataaaaatggtcccgagacattggccccttcaaatactgaagaggttaacataactatacataagaaaacaaatttctgcaaaagacaatgtgagccatttgtacctgtccttaacaaacacagatctacagttcttcagtggccatcagaaatgctggtttatacaactacgaaaccatcaatttcctatagctgtaatcctctatgttttgacttcaagtctactaaagtaaataataatctagataaaaataagccagacttaaaagatctttgttctcagcagaagcaggaagacatttgcatgggaccactttcagattacaaggatgtatctacagaaggactcactgattatgaaattggaagtagcaaaaataaatgcagccaagtcactcctcttttggctgatgatattctctccagtagttgtgattctggaaaaaatgagaacacaggtcagaggtataaaaacatttcctgtaagatcagagaaacagaaaagtataattttactaaaagtcaaataaaacaggacactctagatgaaaaatacaacaaaataaggttgaaagagacccatgaatactggttccataaaagtagaagaaagaaaaaaagaaaaaagttatgtcagcatcatcatatggagaaaaccaaagaatcagaaactcgctgcaaaatggaagcagagaatagttacactgaaaatgctgggaaatatctattggaaccaatttcagaaaagcagtatttagctgcagagcaattattagactcacatcagttacttgataaaaggcccaaatcagaatccatatccttaagtgacaatgaagaaatgtgtaaaacatggaatactgaatacaacacttatgatactatcagttctaaaaaccactgtaaaaagaacacaatacttttaaatggacaatcaaatgcaacaatgatacattctgggaaacataatttaacatattctagaacttactgttgttggaaaaccaaaatgtcaagctgtagtcaggatcacagaagcttagttcttcaaaatgatatgaaacacatgagtcagaatcaggctgttaaaagaggttacaattctgtcatgaatgaatcagaaagattctatcgaaaacgtagacaacattcacattcttattcttcagatgaaagtttaaatcgacagaatcatttaccagaagaatttttgaggccaccaagtacttcagttgctccctgcaagcctaaaaagaaacggaggcgaaaaagaggcagattccaccccggatttgaaactttagaactcaaagaaaatacagattatcccgtgaaagacaattcttccttaaatcctctggataggttaataagtgaagacaaaaaagagaaaatgaaaccacaagaagttgcaaaaatcgaaaggaactcagaacaaacaaaccaattaagaaacaaactgtctttccaccctaacaatctccttccttctgaaaccaatggtgaaactgagcatttagaaatggagaccacttctggtgaattgtcagatgtttccaatgatcccaccacatctgtctgtgtagctagtgccccaacaaaagaagcaattgacaataccctgcttgaacacaaagaaagaagtgagaatataaatcttaatgaaaagcaaattccttttcaggtgcctaatattgaaaggaactttagacagtcacagcctaaatcctatctttgccattatgaactggctgaggcccttccacaaggaaagatgaatgagacaccaactgagtggctgcgttataattcaggaatccttaacacacaaccaccattaccattcaaagaagcacatgtcagtggtcatacttttgtaacagctgagcaaatcctggctccattagctttaccagagcaagcattattgatcccactagaaaaccatgacaaattcaaaaatgtaccatgtgaggtctaccagcacattctgcagccaaacatgctggccaacaaggttaaatttacctttcctccagctgccctcccaccccctagcacacctctgcagcctttgcctttgcagcagtccttatgttctacctctgtaaccactatccatcacactgttttgcagcagcacgctgcagctgctgcagctgcagctgcagccgcagctgcaggaacctttaaagtgcttcagccacaccaacagtttctttcccaaatcccagctctcaccagaacctcattacctcagctctcagtaggaccagtaggaccgaggctttgtcctgggaaccagccaacttttgttgctcctcctcagatgccaatcattccagcttccgttcttcatcctagccatctggctttcccatctttaccccatgcactctttccttcactgctttccccacaccctactgtcatccctttgcaacctctcttctagtcatcaccataatgggaaaaaaatactcttgtgaaaactattgctatatgcgttaagtgttcatctatgtgggtacatggctatttaactggtggaaataaactggccgatacatggcgtcattggtttgaaatcatttactgtaagtgcaatgatgcaaataaatccctaagtttctgatatataatattattaaagcactgaatagtttgaaaatcaatacaatatatgctatatattaaaatgatgtcttaagagtatgtataatgtacataaaatatatttatagtactctaatttatgttgtaaagtatgctcccttggtttttcttaatctttgtgtatttgcacctatttaatgtttagacaaagctgatggcactatgttttgtatcatgttccttgaaactgtaaattcagtgaaaaatatctcttgcaataaatttttgttaactatttaaaaaaaaaaaaaaaaa

SEQ ID NO: 496 - DNA, 3653 bp, Homo sapiens
tatatccccctgaaaaccgtacgttgccaaataatgatttctttggattagagaactacaactcccctgggtcctgagccggtatttcccttttgcggctgcaccgtagttaaaaacaaagctaagtgttctgggacgtatagttctagcgttccttgggtcccgctggcgagcgtgggctttctgcagctcgcaaccggcctcgtgctttgcggacggttcactgcgcttggaaaggggtgagtcggctttttgagggacagcaagtggtgagagtgaaggcccgaggaatgcttagtcccacgggacgaaaggaagcagggatgaagtggtacacttgagaaggggttcaggactttggaggtggtggaacagaggagcttggggcttcctctccttcgactcctgccagataagtgaggctagcagtagtcaagaaagctcattaagtaggatttcataagacttaggtcgagtttggcttttagttgtgcctgccgcctatcgaactcttaattcattatgtcatccgttaagtggacagctgacatttccctgatcttttataaaacatgagaataagtatctttgggaaatctttctattttcattaatctgtaacttatattccaagtagaaactttccctgaaggggcagcttgtagttgtttactagtttcctgctagccctcccaccaccatccactctgatagctgtgctaagttcattcatataaaagttctggagccatcactgttttctcctatgaaggacacaagctgtagtcttttcgctgggagaggctcccatctgcctttctctgtaataatggagagaacgccatagtgaaagggttaaaactcagcaaactgctgaagagtgacaagccctatcacttaactgtgaaattgcttgttattctgtcttacaaagggagacgtgttgttgagctgattgtcgtagacagtttttattctcacttatctgtgtgtctcctttgaaaatggaacttgaaattctaccctcctcagttttctgtttttaatttgaaaaacagccaacatcccctgtgaattgcagtaaaggaacaaagcattaaaaggcatatccttttcccaacaaaagctcacagtctaatcagtaaagatttattgagcaactatgccaggttttgagctgaggctgagcctgcaaagttgaaatctgtgttctctgacctcaaggaacatgaatgaataattagaatataataaaactgtgctagtaggtacaaaatgtgagagcccagaacatgcatataaagcaaacatatctgtaaacttcaaggaagactgggaaatggcttaataaaaatagatacaatgttatggcagatatttaaaaaagatgctcagatattatgtgtcaaggatcatcagcaatcagcaaatcattaattttgagaacttgggatcacagactctaatgttaagtattgtgctagaagccatgtacagagaagtaaaagtaagatgatcatacgtttacaatctcaaaataagcttacgtagacaaataagaatgttcctaagaggtcagtgagaccaaatatttgatatcagatcctttccaacaatatagaggcatcatatttgtagatataaattacagttttcattccttatgagcctaaatttcagcatcaaaatgttaaaagtgatatgtgaatacagatatcacagtgtaaaccacgattaattttcaaatgagttgtagaattaaaatatgtcaagtatttagaggaagggaagatcactgacagagtagactggaaagactttataatcaggagcttgacctgtgaaggacagatagatagaatttattgagaacttaccaagctctttacatctaattcatatttgttctttataaccctgagaggcagatttttgtcttacatctccattttatagatgagaaagctgacagaagttacttgccctgagtcacacacctaggaagtggtagaattagatttcagatctagctctgtcagactgtaaagaccatcctttgaactctaaatggtataaaagacatacagaggaaatgccaggcatcctcagtggcttaaatacgacatcacagtaaactcaggctagaccagggatgacacataaaagatgatagttttcatttgtgttgccatcagcctcctctataaataaacccagagtaaccacaaattgccatcctgaggggttcaacagggaatagtctcataatggatttagagtgaaggatgattggcattgttagtcaggcaagcagagggctgagcagtcaaataacagaatttcagaacaaaagattagagggcagaaatgctgtatgtgctgatagagtcagagagggcccggatcaagaaactgcaggaagagaaaactagaaacctagaatcgtctagaaaactagaacctacaatcgtctcagaacacaaaggaggcttgaggactgagcagactgacatagatgtacttggacaacacctcaccaaggagcatgtctcttcccactcacaatccccaatacgagattcacagtggttcacgctgagtccacaggaaaaattggcctggggtacatcatctaaagatcctaggattgctgcaggtcagcagtctccactggaaaaaaagatcttgaatctaggtggtgtgcatacaacagcagcaagacagttgataatgcagaaatatcaggaggagtgtgaaatactctgtagggagcaagctgtttctcttgactactggcttgccaaagcagagtcttattataataaaataatagtggaaatgatgaaagaagagacaggcaatgaaatctagaaaaaaatggaggagaaaacaacccagagcgtagaaggactaaaacagtactgtttggtacctgagagagagatgaaacacatagaaaggcacatacatcaaacaggaaaggctggagaatttaagaacaaaccatttagacaagtactacaaccccccaatgaaacaaaattaccaaaaattatgccagaagggcatggcatccagaacgcacagagaagaaagcaggtaaatgagagggaacagatgcagactaaggatcaccaggaacgcatgattcgagggagagaacttgcagaacaaagactcaaggagagaatcttgagaagaagccagagccagctacttacatatgagaagcatgagagagtaaaagagataaaggagtttgaaagagttattgcgtatcttcttttccaaccatgcagtagaagtcggattaaagtgagtattcttatggataagtctcagaatggagagaaggtgaatacaattgtgaaaccatatcaaagaaaattcttggcaatgccaccctttttaagaagtcaaataggaaaaataagagattaaagtttcaatgctgttatgataaaatcatatctcttaagtgaacccttttttttttcaaatgctcgttctctccagggttcagtgaatattcccatttgtatcagatacagatagatagttctgcacttgaaaattagcttaacttttttagttgacttgcatttgttcaagttgcatatcctttctagtgttcagtgtcctcatctttaaaa

SEQ ID NO: 497 - DNA, 8866 bp, Homo sapiens
gtgatggcctccctgaaattaaacatttctattagtggcttcccgttaatctcatccttcttagatcaaacctcgttatatctcctgcctatctcttttgcattccaaagttcagttttattaaatcccagggtctaagattttttctttgagaatttatctccagtgtttctatggaaattaaaaaagaaaattaggataattcaatgtcgaaatgttgcatgcatcttttgagaaatttatattttgtaggttgaaggacttgctttttgggcagcgtatttttggaggtggaatgtagttattttaataaccatgtcctaattatttatagcttcctgcctgacacagctcacttcaagaagtgcacaatgtcagaacgtggaattaagtgggcttgtgaatattgtacgtatgaaaactggccatctgcaatcaagtgtactatgtgtcgtgcccaaagacctagtggaacaattattacagaagatccatttaaaagtggttcaagtgatgttggtagagattgggatccttccagcaccgaaggaggaagtagtcctttgatatgtccagactctagtgcaagaccaagggtgaaatcttcgtatagcatggaaaatgcaaataagtggtcatgccacatgtgtacatatttgaactggccaagagcaatcagatgtacccagtgcttatcccaacgtaggaccaggagtcctacagaatctcctcagtcctcaggatctggctcaagaccagttgctttttctgttgatccttgtgaggaatacaatgatagaaataaactgaacactaggacacagcactggacttgctctgtttgcacatatgaaaactgggccaaggctaaaagatgtgttgtttgtgatcatcccagacctaataacattgaagcaatagaattggcagagactgaagaggcttcttcaataataaatgagcaagacagagctcgatggaggggaagttgcagtagtggtaatagccaaaggagatcacctcctgctacgaagcgggactctgaagtgaaaatggattttcagaggattgaattggctggtgctgtgggaagcaaggaggaacttgaagtagactttaaaaaactaaagcaaattaaaaacaggatgaaaaagactgattggctcttcctcaatgcttgtgtgggggttgtagaaggtgatttagctgccatagaagcatacaagtcatcaggaggagacattgcacgtcagctcaccgcagatgaagtacgcttgctgaatcgtccttctgcctttgatgttggctatactcttgtacacttggctatacgttttcagaggcaggatatgctagcaatattgcttacagaggtgtctcaacaagcagcaaagtgtattccagcaatggtgtgtcctgaactgacagaacaaatccggagagagatagctgcctctcttcatcagagaaagggggattttgcttgctattttctgactgaccttgtaacatttacattgccagcagatattgaagatttgcccccaacagtccaagaaaaattatttgatgaggtgcttgatagagacgttcaaaaagaattagaagaagaatctccaattattaactggtccttggaattggctacacgtttggacagtcgactgtatgcactttggaaccggactgcaggagactgcctacttgattcagttctacaagctacctggggcatctatgacaaggactcagtgcttcggaaagccctgcatgacagcctgcatgactgttcacattggttttacacacgctggaaagattgggaatcatggtattctcagagctttggtttacatttttccttgagagaagaacagtggcaagaagactgggcatttatactctctcttgctagtcagcctggagcaagcttggagcagacgcacatttttgtactggcacatattcttagacgaccaattatagtttatggagtaaaatattacaagagtttccggggagaaactttaggatatactcggtttcaaggtgtttatctgcctttgttgtgggaacagagtttttgttggaaaagtccgattgctctgggttatacgaggggccacttctctgctttggttgccatggaaaatgatggctatggcaaccgaggtgctggtgctaatctcaataccgatgatgatgtcaccatcacatttttgcctctggttgacagtgaaaggaagctactccatgtgcacttcctttctgctcaggagctaggtaatgaggaacagcaagaaaaactgctcagggagtggctggactgctgtgtgacggaggggggagttctggttgccatgcagaagagttctcggcggcgaaatcaccccctggtcactcagatggtagaaaaatggcttgaccgctaccgacagatccggccgtgtacatccctgtctgatggagaggaagatgaggatgatgaagatgaatgaaaaaaaaaatcaaacagcagaagaccaaggcatcagatctgtaatgaccctaaagttagtgtggtgctccaagcagagtcgacatcatggaatgaaccaaatctggcaggatctgctcggggaagtgttttcctggaccacacacaccttatggagataatgcctctgctgcgtgaggagacagagaactttagttggactacagtttgtaaaaaaaactaattttattaagacagaactttttttccttccaaattgtaaatctgtctataaatgtaacgcatgtggttgtgtaagacattgtttaataggaaaagttgtaccagcatcttcatattattgagaaaattttttccagcatgggcacttagaaaaagcacatggcaaatggctctttgttcctttcagatattatttcagtagaacctggcattctactttcaccttaaaagatccatctaagtctcagatctggaaacgttttgtaccgattatccacagcaaaacaaaaataagcttttattttattaataatttcgttcctcttgtgcccaatcaaatcttttaggaacaaactgcaagaaaagctaagaatgttttagagtgaactaaatacagacattgcttacttgttttgaagagggttttggttttggttattgtgtctttaagttttctgatatgccccctttcaatatttagatatttatttgttgggaagaataccttaaaatgagggttcttattccagattctgggcagtggtctgtgagtagtttttttcctggatgaaaagggagcaagcccacttgtcactaaatgaattgtgtgaaatgtgctcacttggactccatcaacaatgtgctgctcccagattgccatgccagagggtcttcggattcttccttctatcacctctgctctaagcaaatcttgttagaagggcatgcctttgcttaggcagattgggaataccaattcactacagaataaagattttaaaaatgcaataaggtggcaaatgcattgtatgaagaatttctcagtgtttagtctgagaatttttgcatgttggttaattgtggccattctttaatttaaagttaaaactataatcttaggtagaaaaacttttttataagaagtattatttgaccacttcaggtatacattcaatactgggtaaaaatttcagacctatctcaggaacacagaaatatttggtgtcctgataagcactttctagactattgatgtggccaggaatttggaaagacgacacacgcacgcgcgcgcgcgcacacacacacacacacacacacacacacacagttttttccttccctgtgatgaaaaaggctgtgaaaaccttaaagtatttgcttgcttcttgttttgtttagttgataatgaaatgtgtacaacctcaaatttgctgccagaatactaaaaatagaaaaatacccacaaaactgtcatgtctttagttctttccccccgaaaactcagtaaaaaggtgttcccaggatgaaaagatcattttttgctgcatgctaaatcttgcaggaaaaatgattttttagtacgattctgtagaaatgaatctttgatataatgtaaatgctgctgtttgtttcaagtggtgaatgtgttgttaaaaattggctgtttgctttcattttggccaataagtaatcaagtttgtagaaaatgttagcattctgactacttagcatctgtagtaatttctctatgtatagggataattttttagtgggcagagatcctgttctagttgcctgttaagcaaaatctgccctcccaattgaaaaagccaaagagaattgttagagggaaaagcatgtagccattgcagtctgcattgcagccagcgttgtccagagtacacgctcagcacttagcttctactgtgtgttgtggtctggtgagtgttgtttcccctgagcgctctattatttatttatttattatcaatcagtgaccctgaccacatagtgtgataggtgcagcattcttccctgtgggaaagaattaaagatggttccatttcctaggctacagacaggaatggggctctaaatggttttcatagactggctgttaaaggccaaaaattttggtaaatcaatgctatattatgctcttgaactattaaaacagccataattattgtcccaagatagaatatagtcctttttcaaagatgattatacgtggctaggtgacagacattaatgactgactctggagagtaagtcatacctgcactctgtggacttgatggttctttttctagagcaaacagagcgtggcattttgttttgacttgttcttccttggggtcaaatttatatatatatatataaatttttgtttgggcgaccaagatctaataattaaaacccaggtggaccatggattcaagtgatgaactcatgctctgttctgttttctcaaagctgaagtcggctaggtttgcaaagctgtgggctgagcactcaggcaatcacactctcagaaactgcggcggctctggactgcagcctcccaaggctccatgccagacaaagcatgcgtgtcacacttgctacaatagcctggatggtttcttttgtctccaattattcacacacagcaaatattttgccagatatcgaaaatgaagatttcatcaaagactgcgttcgaatccataacaagttccgatcagaggtgaaaccaacagccagtgatatgctatacatgacttgggacccagcactagcccaaattgcaaaagcatgggccagcaattgccagttttcacataatacacggctgaagccaccccacaagctgcacccaaacttcacttcactgggagagaacatctggactgggtctgtgcccattttttctgtgtcttccgccatcacaaactggtatgacgaaatccaggactatgacttcaagactcggatatgcaaaaaagtctgtggccactacactcaggttgtttgggcagatagttacaaagttggctgcgcagttcaattttgccctaaagtttctggctttgacgctctttccaatggagcacattttatatgcaactacggaccaggagggaattacccaacttggccatataagagaggagccacctgcagtgcctgccccaataatgacaagtgtttggacaatctctgtgttaaccgacagcgagaccaagtcaaacgttactactctgttgtatatccaggctggcccatatatccacgtaacagatacacttctctctttctcattgttaattcagtaattctaatactgtctgttataattaccattttggtacagcacaagtaccctaatttagttcttttggactaatacaattcaggaaagaaaaaacccaaaaaccaacctcattcacatatggctttttttttaaccaataacaattaggtgtacttctattttaaaacatttcagaaaaaaatatatgttatagcaatactcttactcaaaagaagaaatttcctaactctatcagataaactcatctttagtataaataagcattatttgcaggttgccacaggtggacttttagtaagtaacctaacccatgtttcagcttctaaatctgcaaaatgagcaaggtacagtagcacatttttaggtgattcttagtaactccagtagccttcattagttaaaaacattattattttttgcatgctgcttcgactctaaatatctggttttccctgtctttttggtttactacttccccagattcagaacagaggagtaactaggggatctgattttagaggccttaattttctgttcatggactgttaaaagtaaaaccaaactttcaaaagggataaacctaaatatttacttgttatcattagagagggaacatcaaatgctgggacatcattactaaccaatagcatcagacactggatttaatggataatcacaatggtcgtaatgtatacaaagacttatataccactttctcgtataaatttttcaaaaaatacaataataatataatttataaagaacactcttctatgaacaaccaccaccaccaaaaaaaaaaaaagccctcagaaaatttctcacaaataaggcaactaatgcctgatatctcaaaatcctttacaaaaggagatagttctagtcaaggagttttgggtatgttacttttttttcttctttttcttttcatctgcctccatcttaagtgcaatttcttcagctgtaagagctcccagtttcttattctttgctttcttaaccttttccttgatgctggccacatcaattttagtttcagtagaagctagacaaattaaaagcacaacacatgtaatactttagattttaccaagtaaaacaaagaatatatgtttaacaaagaatatatgtttaaggcagttaacttcagagtattcttataattgaataattgaaaggtgatcacagtataaaatataaaaacacttgcctaaagcagttagaaatttcttcagattaagataaaacaaatcataaaatactttatatattagtacaagtatacataaaaatggcataaatggcataattgaaccaattactggattcaactatattaagactatttccttaaatcctacttcagactaaattattttacctacattcttttccatattttggaacttctgagtcattattttccatcttgcacattaaaataatttaaaattacatgtatcccttctcaataagtttaatcagctaaccctaagctagaggtcaaaatctacttcctctaatatcaaaacgaaaatttaaagttttccaaatattaattcaatattaattgaatattcaatgaattaattcatttaatgttagattaattcattgaatattaattcaatgaatgactaattaatagtattttaacaagattttggtatatttaacaacattttggtaataaagacaataatttgagagtgtgtggaagtccccctaatagaagccaactatctaatcaatgccaaaagtgtgaacaaaatagagaaaggaagcagtgaaaaagaatgcaactttttcttaccattcaaagtacaggatcacagcataaaagaatcataagataaaacatcaaactacccagcaacctgagaagcacagagtgttaaagcctccaccgtgtggagaaactaaattagggtaactagctattgagtatattgagtaccttcaaagcactcaactgacaggttttacagactggaaattataatacttatgacatttctaccttttatataaccaataatctaccatagaatgtagtatttttaaagctattaacaagcaatatattaaaataataatgtattatatctgtttctgacccagtctatgtacaatattgctggtgagccctctcccttcagtgtgtcactgttcactttggagggttactttaggaagaggataagtgttaccacaggggaaaaaaatgcagaagaggatgcatcagaagaaatggcatgacaatgttttctcttagtgtcttttaaatactaggttagtgcgaaagtgatttctgccatttaaaaaccacaatcactttcgcactaatagctcctgaataagacctgtcagcatcctttagtctaaggtgatgagaaatccatgttaccgatatagaagccaaactctaagccaagatcacataaagagaagaaaaagtacaacttctgataattcctctttgagaggcatgacagcagagctcagggatcttcttgcatttctacagaagatgcactggctgccctgggtttgtatctttcacaacaaagagtcttttccaagcacagaccagaggtcaggagaggactgtcaatccagtttgcactgaaataggcattagctgcctctaaattataaattatctcagccatcccttgtccttaggattagtaattaatgaaatgctaagagaactgatgaaaagatacaactgtttcttaaaaagattcagacaaatttattatgggtttacttttcctaattaataaagacttttacatcatagaaagcattaccttccttaggtttcacaattggtttttccttaggtggaataaatgctttgtttctttcctcttgtctcttactgatggcttctgcttgtttagcctacattaataaataaaaaatatatcagttaaatgtatttatagttaaataattcaagtatctatgaactttgctattcatgtgagccagacataaagtgccgtacctttattgcttccaaaaaaaaaaaaaaaaaa

SEQ ID NO: 498 - DNA, 5519 bp, Homo sapiens
atggcggagcgcggacagcagcctcctcccgcgaaacggctttgctgccggccgggcggcggcggcggcggcgggggcagcagcggcggcggcggcggcgcgggtggcggctacagctctgcctgtcggccaggcccgcgggcgggtggcgcggcggcggcggcggcgtgcgggggcggcgcggcgctggggttgctgccgccgggcaagacccagagccccgagtcgctgctggacatcgcggcgcgcagggtggcggagaagtggccgttccagcgcgtggaggagcgctttgagcgcatcccggagccggtgcagcgccgcatagtctattggtccttcccccgcagcgagcgggagatctgcatgtactcgtccttcaacaccggcggcggcgccgcgggcggccccggcgacgacagcggtggcggcggcggcgcgggcggcggcggcggcggcggctcctcgtcttccccggccgcaacctcggcggccgcaacctcggccgccgccgccgctgccgccgccgccgccgccgccgccgccgccgcgggggccggggccccgtcggtgggggctgccggggcggcggacggcggcgacgagacgcggctgcctttccgccggggcatcgcgctgttggaaagcggctgcgtagacaacgtcctgcaagtcggtttccacttgagcggcacagtgacagaacctgcaatacaatcggagccagaaactgtttgcaacgtggccatcagctttgatcgttgcaagattacctcagtgacctgcagctgtggaaacaaggacatattttattgtgcccatgttgtggcactgtctttataccgcatccgcaagccagatcaggtcaaactgcatcttcctatttcagagactctctttcaaatgaatagagaccaactgcaaaagtttgtacagtatttgatcacagtgcaccacacagaagttttgccaactgctcaaaaattagcagatgaaattctttcccaaaattcagaaatcaaccaagttcatggtgctcctgatccaacagcaggtgctagtatagatgatgaaaactgctggcacttagatgaagagcaggttcaagaacaggttaaactgttcctttcccagggcgggtaccacggatcagggaagcagcttaatttgctctttgcaaaggtgcgggagatgttaaagatgagggactccaatggggcccgcatgttgaccttgataacagagcaattcatggctgaccctcgcctgtcactttggcggcaacaaggcactgcaatgactgacaaatacaggcagctctgggatgagctgggtgctctgtggatgtgtatagttttaaacccccactgcaagttggagcaaaaggccagttggctaaaacagctgaagaaatggaatagtgttgatgtctgtccatgggaagatggaaatcatggcagtgaattacccaacttaaccaatgctctgcctcagggtgcaaatgccaaccaagattcatcgaacaggccacatcggacagtgttcacccgagccatcgaggcatgcgatctccactggcaggatagccacttgcagcacattatcagcagtgacctatacaccaactactgttaccatgacgacactgaaaactccctcttcgactcccgcgggtggcccctctggcatgaacatgttcctacagcctgtgcaagagtggacgcattacgttctcatgggtaccccagagaagcactgagactagcaatagctattgttaatacattaagacgacagcagcagaaacagttggaaatgttccgaacccaaaaaaaagagctaccccataaaaacataacctcgataaccaatctggagggctgggttggacatcccctggaccctgtgggcactctcttcagtagccttatggaagcctgccgcattgatgatgagaacctctctgggttctcagattttacagagaatatgggacagtgcaagtctctggaataccagcatctacctgcacacaaattcttagaagaaggggaatcctatttaacgctggctgtggaagtagccctgatagggctaggacagcagcgtatcatgcctgatgggctgtacacacaagagaaagtttgccggaatgaggagcagctcatttctaagcttcaggaaattgaattggatgacacactggtgaaaatttttcgcaagcaagcagtcttcctattagaagccggaccatatagtggtttaggtgaaataatccatcgggagagcgttccaatgcacacatttgccaagtatctcttcacctctctcctacctcacgatgctgaattggcatacaaaattgcactgagagcaatgcggttactagtattggaatctactgctccatcaggagacctcacccgcccacaccacattgcatcagttgttcccaaccgctaccctcgctggttcactctaagccacattgagtcccagcagtgtgagctggcatccaccatgctaactgcagccaaaggcgatgttcggaggctggaaacagtattagaatccatccagaaaaacattcactcctcatcacacatcttcaagcttgcccaagatgcatttaaaatagcaactctcatggacagtttgccagacatcactcttttgaaagtgtctctggagctgggcctgcaggttatgcgaatgacactgtcaaccttaaattggcgacggcgggagatggtgaggtggctggtaacgtgtgctactgaagtcggggtttatgccctggacagcatcatgcagacctggtttacactctttactcccaccgaggccacaagtatagttgcaactaccgtgatgtccaacagcaccatcgtccgcctccacctggactgccaccagcaggaaaagctggccagcagcgcccggacacttgcactgcagtgtgccatgaaggatccacagaactgtgccctctctgcgctaaccctttgtgaaaaggatcacatagcttttgagacggcgtaccaaattgttctcgacgctgctacgactggcatgagctatacacagctctttacaatagcacggtacatggagcaccgcgggtaccccatgagggcctacaagctggccaccctggccatgacccatctcaacctgagctacaatcaggacacacaccctgccattaatgatgttttgtgggcctgtgcgcttagccactcccttggtaaaaatgagcttgcagctataatacctctggtggtcaagagtgtcaagtgtgcaacggtactgtcagacattttgcgcagatgcactctgaccactcctggcatggtgggacttcatgggaggaggaactctggtaagctcatgtcactggacaaagcccccttgaggcaactcttggatgccacgatcggggcctacatcaacacaacgcactcacggctcacacacatcagtcctcggcactatagtgagtttatagagttcctcagcaaagcccgagagaccttcttaatggcgcatgatggacacattcagtttacacagtttattgacaacctgaaacaaatctacaaaggcaaaaagaaactgatgatgttggttcgggagaggtttggttgatagatcttgtatgaatggggtggggggtggggatgggagggatggtttgtttttacttgagcctgcctttgtaccctttttaacttaaagaacagagccacaccggtattatatgtgtatagttatattgcgtttgcagactaaattgtcatgttgtgaaagtttgtgtgttttttattttttccctatttctttctttcctttattttattattttttttaattttttttttctggttttgtatgagagagaggttaaaaaggtttggtttacactgagtatatgttgtcaagtggcaaaagtccacatagctctcctgttttctgtatacgttcacagcctcaaaaaaaataattgaaatggctttaaaaaccaaacaaaacacctccatcctgtgataagtacctcgaatggattcagctttactcctttgtaactcatctttacattttcagcatatttaaacaaaccaacaaaatgaaatactaatagtaaaaaggctgacccatgtggctttgcagtgctgttcgtccagaagcatggcacacgatgcttgtgcatgtggaaacttagcgactgtcaacatacattctcagggatttatccaaaaaaattaaaaaaagaatgagagcatttattgtactgtatatatattatagtatatgtctgaatattgaaaatataacattaactaatttataaaaaatattctatgtaatgcaaaatacttgaagctgcagtagcttggttttaaacaaaaacaaaaaaaaaactgagagaaaacctatcagaaggactaaaagtacgccttgcttcagggttggctcaggtggtgaacttcatgctgggcatctatgcagagccaccttttggattgcatggttggactgagatctattgggagaaattatatatgtatatatatttatacaacttatgtatacatatatatatgtatacacacagacacacacacacaccaccaacaaccaccactacaccacacatgcttataacaggcactagaataaagagggacaacaaaatacacagccagagcagcaagccttagcattaagaatatacaatatgccggaattggggttcgtgcctcctagcctaggaaacttaaaagaaatatccttttgacacaaaacacaaaatgttttccaaaacaattgacataatgatacattacgcctttgcagtgagctaataataagctaacctttgtgcacaaataacattatatatattatatatctattctgcataggtattttgactttgtgcaggacagaaagttgtgtaggtatgactgttctacttttcagttttctttttttttaatatattttattttctctagaaattactcaaacaaaagcagccttctatcttgccttgtcttaatgctttaaaataaccaaactggagatctaactaccaaactgttcattatattattaaataccaactttggttacagtatagtgtctttactttagctgatggttctgtaaccttgtgctttttaaagcaatttttatgttttggtgcaaaagttgtccagtgtctcttgttcccttcactagagaacatgcttagaggtatgtttgtaggtatttttgtttagaagaactatttcatgcgctccattttatttattataataggtaaaaagaaaaaaaaaggttgtaattcatcacccatgtaaacatgctcatgaagttgaaagtaattaagatttgatacactgatatcaatttatttatgtaactaaatcactgttttataaacttgttaatgatcaacaatttttgttttgattaaaattagttttttgaaagttgaaaaaaaaaaaaaaaaa

SEQ ID NO: 499 - DNA, 2325 bp, Homo sapiens
cccgccccctctcttctccctccctcctccttccgtgtgtccctccccgcccggctggaggctgctccggaccgggacgcagagtctgcggacccggcgccgaggcggccacccgagacgcggcgcgcacgctccggcctgcgcagcccggcccggccatggcggccccccgcccgtctcccgcgatctccgtttcggtctcggctccggctttttacgccccgcagaagaagttcggccctgtggtggccccaaagcccaaagtgaatcccttccggcccggggacagcgagcctcccccggcacccggggcccagcgcgcacagatgggccgggtgggcgagattcccccgccgcccccggaagactttcccctgcctccacctccccttgctggggatggcgacgatgcagagggtgctctgggaggtgccttcccgccgccccctcccccgatcgaggaatcatttccccctgcgcctctggaggaggagatcttcccttccccgccgcctcctccggaggaggagggagggcctgaggcccccataccgcccccaccacagcccagggagaaggtgagcagtattgatttggagatcgactctctgtcctcactgctggatgacatgaccaagaatgatcctttcaaagcccgggtgtcatctggatatgtgcccccaccagtggccactccattcagttccaagtccagtaccaagcctgcagccgggggcacagcacccctgcctccttggaagtccccttccagctcccagcctctgccccaggttccggctccggctcagagccagacacagttccatgttcagccccagccccagcccaagcctcaggtccaactccatgtccagtcccagacccagcctgtgtctttggctaacacccagccccgagggcccccagcctcatctccggctccagcccctaagttttctccagtgactcctaagtttactcctgtggcttccaagttcagtcctggagccccaggtggatctgggtcacaaccaaatcaaaaattggggcaccccgaagctctttctgctggcacaggctcccctcaacctcccagcttcacctatgcccagcagagggagaagccccgagtgcaggagaagcagcaccccgtgcccccaccggctcagaaccaaaaccaggtgcgctcccctggggccccagggcccctgactctgaaggaggtggaggagctggagcagctgacccagcagctaatgcaggacatggagcatcctcagaggcagaatgtggctgtcaacgaactctgcggccgatgccatcaacccctggcccgggcgcagccagccgtccgcgctctagggcagctgttccacatcgcctgcttcacctgccaccagtgtgcgcagcagctccagggccagcagttctacagtctggagggggcgccgtactgcgagggctgttacactgacaccctggagaagtgtaacacctgcggggagcccatcactgaccgcatgctgagggccacgggcaaggcctatcacccgcactgcttcacctgtgtggtctgcgcccgccccctggagggcacctccttcatcgtggaccaggccaaccggccccactgtgtccccgactaccacaagcagtacgccccgaggtgctccgtctgctctgagcccatcatgcctgagcctggccgagatgagactgtgcgagtggtcgccctggacaagaacttccacatgaagtgttacaagtgtgaggactgcgggaagcccctgtcgattgaggcagatgacaatggctgcttccccctggacggtcacgtgctctgtcggaagtgccacactgctagagcccagacctgagtgaggacaggccctcttcagaccgcagtccatgccccattgtggaccacccacactgagaccacctgcccccacctcagttattgttttgatgtctagcccctcccatttccaacccctccctagcatcccaggtgccctgacccaggacccaacatggtctagggatgcaggatccccgccctggggtctggtcctcgcccatcctgcagggattgcccaccgtcttccagacaccccacctgaggggggcaccaggtttagtgctgctgctttcactgctgcacccgcgccctcggccggccccccgagcagcctttgtactctgcttgcggagggctgggagaccctccaggacattcccaccctcccccatgctgccaagttgtagctatagctacaaataaaaaaaaaccttgttttccagaaaaaaaaaaaaaaaaaaaaa

1. A method of determining an expression level of an LPA-associated disease marker protein of SEQ ID NO:1-202 in a subject that has or is at risk for developing an LPA-associated disease, said method comprising:
(i) obtaining a biological sample from said subject; and
(ii) determining an expression level of an LPA-associated disease marker protein of SEQ ID NO:1-202 in said biological sample.

2. The method of claim 1, wherein said determining comprises: (a) contacting said LPA-associated disease marker protein with a marker protein binding agent in said biological sample, thereby forming a disease marker protein-binding agent complex; and (b) detecting said disease marker protein-binding agent complex.

3-5. (canceled)

6. The method of claim 2, wherein said detecting comprises contacting said disease marker protein-binding agent complex with a capturing agent, thereby forming a captured disease marker protein-binding agent complex.

7. The method of claim 6, wherein said detecting further comprises: (1) contacting said captured disease marker protein-binding agent complex with a tagging moiety; thereby forming a tagged disease marker protein-binding agent complex; and (2) separating said tagged disease marker protein-binding agent complex from said biological sample.

8. The method of claim 7, wherein said detecting further comprises after said separating of step (2) separating said capturing binding agent from said tagged disease marker protein-binding agent complex, thereby forming a cleaved disease marker protein-binding agent complex.

9. The method of claim 8, wherein said detecting further comprises: (3) separating said marker protein binding agent from said cleaved disease marker protein-binding agent complex; thereby forming a released marker protein binding agent; and (4) determining an amount of said released marker protein binding agent.

10. The method of claim 1, further comprising selecting a subject that has or is at risk for developing an LPA-associated disease.

11-12. (canceled)

13. The method of claim 10, further comprising administering to said subject an effective amount of a modulator of said LPA-associated disease marker protein of SEQ ID NO:1-202.

14-20. (canceled)

21. The method of claim 1, wherein said LPA-associated disease marker protein is SEQ ID NO:9, SEQ ID NO:23, SEQ ID NO:32, SEQ ID NO:47, SEQ ID NO:58, SEQ ID NO:90, SEQ ID NO:93, SEQ ID NO:102, SEQ ID NO:118, SEQ ID NO:131, SEQ ID NO:136, SEQ ID NO:139, SEQ ID NO:141, SEQ ID NO:143, SEQ ID NO:149, SEQ ID NO:152, SEQ ID NO:160, SEQ ID NO:164, SEQ ID NO:183 or SEQ ID NO:185.

22. A method of determining an expression level of an LPA-associated disease marker RNA of SEQ ID NO:203-499 in a subject that has or is at risk for developing an LPA-associated disease, said method comprising:
(i) obtaining a biological sample from said subject; and
(ii) determining an expression level of an LPA-associated disease marker RNA of SEQ ID NO:203-499 in said biological sample.

23. The method of claim 22, wherein said determining comprises: (a) contacting said LPA-associated disease marker RNA with a marker RNA binding agent in said biological sample, thereby forming a disease marker RNA-binding agent complex; and (b) detecting said disease marker RNA-binding agent complex.

24-26. (canceled)

27. The method of claim 23, wherein said detecting comprises contacting said disease marker RNA-binding agent complex with a capturing agent, thereby forming a captured disease marker RNA-binding agent complex.

28. The method of claim 27, wherein said detecting further comprises: (1) contacting said captured disease marker RNA-binding agent complex with a tagging moiety; thereby forming a tagged disease marker RNA-binding agent complex; and (2) separating said tagged disease marker RNA-binding agent complex from said biological sample.

29. The method of claim 28, wherein said detecting further comprises after said separating of step (2) separating said capturing binding agent from said tagged disease marker RNA-binding agent complex, thereby forming a cleaved disease marker RNA-binding agent complex.

30. The method of claim 29, wherein said detecting further comprises: (3) separating said marker RNA binding agent from said cleaved disease marker RNA-binding agent complex; thereby forming a released marker RNA binding agent; and (4) determining an amount of said released marker RNA binding agent.

31. The method of claim 22, further comprising selecting a subject that has or is at risk for developing an LPA-associated disease.

32-33. (canceled)

34. The method of claim 31, further comprising administering to said subject an effective amount of a modulator of said LPA-associated disease marker RNA of SEQ ID NO:203-499.

35-41. (canceled)

42. The method of claim 22, wherein said LPA-associated disease marker RNA is SEQ ID NO:209, SEQ ID NO:214, SEQ ID NO:216, SEQ ID NO:217, SEQ ID NO:218, SEQ ID NO:219, SEQ ID NO:222, SEQ ID NO:236, SEQ ID NO:237, SEQ ID NO:242, SEQ ID NO:243, SEQ ID NO:267, SEQ ID NO:269, SEQ ID NO:270, SEQ ID NO:271, SEQ ID NO:303, SEQ ID NO:309, SEQ ID NO:353, SEQ ID NO:364, SEQ ID NO:378, SEQ ID NO:396, SEQ ID NO:417, SEQ ID NO:432 or SEQ ID NO:448.

43. A method of determining whether a subject has or is at risk of developing an LPA-associated disease, said method comprising:
(i) detecting an expression level of one or more LPA-associated disease marker proteins of SEQ ID NO:1-202 in a subject;
(ii) determining whether said expression level is increased or decreased relative to a standard control, wherein an elevated expression level of an LPA-associated disease marker protein of SEQ ID NO:1-202 or a decreased expression level of an LPA-associated disease marker protein of SEQ ID NO:1-202 relative to said standard control indicates that said subject has or is at risk of developing an LPA-associated disease; and
(iii) based at least in part on said expression level in step (ii), determining whether said subject has or is at risk for developing an LPA-associated disease.

44-47. (canceled)

48. The method of claim 43, further comprising administering to said subject an effective amount of a modulator of said LPA-associated disease marker protein of SEQ ID NO:1-202.

49-53. (canceled)

54. A method of determining whether a subject has or is at risk of developing an LPA-associated disease, said method comprising:
(i) detecting an expression level of one or more LPA-associated disease marker RNAs of SEQ ID NO:203-499 in a subject;
(ii) determining whether said expression level is increased or decreased relative to a standard control, wherein an elevated expression level of an LPA-associated disease marker RNA of SEQ ID NO:203-499 or a decreased expression level of an LPA-associated disease marker RNA of SEQ ID NO:203-499 relative to said standard control indicates that said subject has or is at risk of developing an LPA-associated disease; and
(iii) based at least in part on said expression level in step (ii), determining whether said subject has or is at risk for developing an LPA-associated disease.

55-58. (canceled)

59. The method of claim 54, further comprising administering to said subject an effective amount of a modulator of said LPA-associated disease marker RNA of SEQ ID NO:203-499.

60-66. (canceled)

67. A method of treating an LPA-associated disease in a subject in need thereof, said method comprising administering to said subject an effective amount of an modulator of an LPA-associated disease marker protein of SEQ ID NO:1-202, thereby treating an LPA-associated disease in said subject.

68. A method of treating an LPA-associated disease in a subject in need thereof, said method comprising administering to said subject an effective amount of an modulator of an LPA-associated disease marker RNA of SEQ ID NO:203-499, thereby treating an LPA-associated disease in said subject.

69-70. (canceled)

71. A method of determining whether an LPA-associated disease patient is at risk for progression of the LPA-associated disease, the method comprising:
(i) detecting an expression level of one or more LPA-associated disease marker proteins set forth of SEQ ID NO:1-202 in an LPA-associated disease patient;
(ii) determining whether said expression level is modulated relative to a standard control,
wherein a modulated expression level of an LPA-associated disease marker protein of SEQ ID NO:1-202 relative to said standard control indicates that said LPA-associated disease patient is at risk for progression of said LPA-associated disease; and (iii) based at least in part on said expression level in step (ii), determining whether said LPA-associated disease patient is at risk for progression of said LPA-associated disease.

72. A method of determining whether an LPA-associated disease patient is at risk for progression of the LPA-associated disease, the method comprising:
(i) detecting an expression level of one or more LPA-associated disease marker RNAs of SEQ ID NO:203-499 in an LPA-associated disease patient;
(ii) determining whether said expression level is modulated relative to a standard control,
wherein a modulated expression level of an LPA-associated disease marker RNA of SEQ ID NO:203-499 relative to said standard control indicates that said LPA-associated disease patient is at risk for progression of said LPA-associated disease; and (iii) based at least in part on said expression level in step (ii), determining whether said LPA-associated disease patient is at risk for progression of said LPA-associated disease.

73-76. (canceled)

77. A kit comprising: (a) a marker protein binding agent capable of binding to a substance within a biological sample from a human subject having or at risk of developing an LPA-associated disease; wherein said substance is an LPA-associated disease marker protein of SEQ ID NO:1-202 or fragment thereof; (b) a detecting reagent or a detecting apparatus capable of indicating binding of said marker protein binding agent to said substance.

78. A kit comprising: (a) a marker RNA binding agent capable of binding to a substance within a biological sample from a human subject having or at risk of developing an LPA-associated disease; wherein said substance is an LPA-associated disease marker RNA of SEQ ID NO:203-499 or fragment thereof; (b) a detecting reagent or a detecting apparatus capable of indicating binding of said marker RNA binding agent to said substance.

79. The method of one of claim 1, 22, 43, 54, 67, 68, 71 or 72, wherein said LPA-associated disease is a fibrotic pulmonary disease.

80. The method of claim 79, wherein said fibrotic pulmonary disease is idiopathic pulmonary fibrosis or familial interstitial pneumonia.

81. The method of claim 79, wherein said fibrotic pulmonary disease is a progressive form of idiopathic pulmonary fibrosis.

82. The kit of one of claim 77 or 78, wherein said LPA-associated disease is a fibrotic pulmonary disease.

83. The kit of claim 82, wherein said fibrotic pulmonary disease is idiopathic pulmonary fibrosis or familial interstitial pneumonia.

84. The kit of claim 82, wherein said fibrotic pulmonary disease is a progressive form of idiopathic pulmonary fibrosis.
